(19) United States
(12) Patent Application Publication
(10) Pub. No.: US 2025/0388650 A1
(43) Pub. Date: Dec. 25, 2025

(54) OLIGO-TRAP FUSION PROTEINS (OFPs) AND USES THEREOF

(71) Applicant: ENOSI THERAPEUTICS CORPORATION, Eugene, OR (US)

(72) Inventors: H. Michael Shepard, Eugene, OR (US); Pei JIN, Palo Alto, CA (US)

(21) Appl. No.: 19/317,769

(22) Filed: Sep. 3, 2025

Related U.S. Application Data
(63) Continuation of application No. PCT/US24/18242, filed on Mar. 1, 2024.
Application No. PCT/US24/18242 is a continuation-in-part of application No. PCT/US23/63707, filed on Mar. 3, 2023.
(63) Continuation-in-part of application No. PCT/US23/63707, filed on Mar. 3, 2023.
(60) Provisional application No. 63/581,254, filed on Sep. 7, 2023.

(51) Int. Cl. C07K 14/82; A61K 38/00; A61P 37/06; C07K 1/22; C07K 14/71

(52) U.S. Cl. CPC C07K 14/82; A61P 37/06; C07K 1/22; C07K 14/71; A61K 38/00; C07K 2317/72; C07K 2319/30

(57) ABSTRACT

Chimeric polypeptides comprising extracellular domains (ECDs), modified ECDs and portions thereof, and modified multimerization domains, such as modified Fc's are provided. “Growth factor ligand traps” (GFTs or oligo-traps) comprising the chimeric polypeptides, and methods of making and using them are provided.

### RELATED APPLICATIONS

[0001] This application is a continuation of International PCT application No. PCT/US24/18242, filed Mar. 1, 2024, published as International PCT publication No. WO 2024/186690 on Sep. 12, 2024, entitled OLIGO-TRAP FUSION PROTEINS (OFPs) AND USES THEREOF,” to inventors H. Michael Shepard and Pei Jin, and to Applicant Enosi Therapeutics Corporation. International PCT application No. PCT/US24/18242 claims benefit of priority as a continuation-in-part of International PCT application No. PCT/US23/63707, filed Mar. 3, 2023, published as International PCT publication No. WO 2023/168426 on Sep. 7, 2023, entitled “COMPOSITIONS AND CELLS CONTAINING MIXTURES OF OLIGO-TRAP FUSION PROTEINS (OFPS) AND USES THEREOF,” to inventors H. Michael Shepard and Pei Jin, and to Applicant Enosi Therapeutics Corporation, and claims benefit of priority to U.S. provisional application Ser. No. 63/581,254, filed Sep. 7, 2023, entitled “OLIGO-TRAP FUSION PROTEINS (OFPs) AND USES THEREOF,” each to inventors H. Michael Shepard and Pei Jin, and to Applicant Enosi Therapeutics Corporation.

[0002] Benefit of priority is claimed to U.S. provisional application Ser. No. 63/581,254, filed Sep. 7, 2023, entitled “OLIGO-TRAP FUSION PROTEINS (OFPs) AND USES THEREOF,” to inventors H. Michael Shepard and Pei Jin, and to Applicant Enosi Therapeutics Corporation.

[0003] This application is a continuation-in-part of International PCT application No. PCT/US23/63707, filed Mar. 3, 2023, published as International PCT publication No. WO 2023/168426, on Sep. 7, 2023, entitled “COMPOSITIONS AND CELLS CONTAINING MIXTURES OF OLIGO-TRAP FUSION PROTEINS (OFPs) AND USES THEREOF,” to inventors H. Michael Shepard and Pei Jin, and to Applicant Enosi Therapeutics Corporation.

[0004] The subject matter of each of these applications is incorporated by reference.

### FIELD

[0005] Chimeric polypeptides comprising extracellular domains and modified multimerization domains, such as modified Fc's are provided. “Growth factor ligand traps” (GFTs or oligo-traps) comprising the chimeric polypeptides, and methods of making and using them are provided.

### INCORPORATION BY REFERENCE OF SEQUENCE LISTING PROVIDED ELECTRONICALLY

[0006] An electronic version of the Sequence Listing is filed herewith, the contents of which are incorporated by reference in their entirety. The electronic file was created on Sep. 2, 2025, is 1,389,447 bytes in size, and is titled 5307SEQ001.xml.

### BACKGROUND

[0007] Cell signaling pathways involve a network of molecules including polypeptides and small molecules that interact to relay extracellular, intercellular, and intracellular signals. Such pathways interact, handing off signals from one member of the pathway to the next. Modulation of one member of the pathway can be relayed through the signal transduction pathway, resulting in modulation of activities of other pathway members and in modulating outcomes of such signal transduction such as affecting phenotypes and responses of a cell or organism to a signal. Diseases and disorders can involve mis-regulated or changes in the modulation of signal transduction pathways. A goal of drug development is to target such mis-regulated pathways to restore more normal regulation in the signal transduction pathway.

[0008] Multi-specific therapeutics, such as bi-specific therapeutics, are targeted to a plurality of pathways or receptors or ligands in the pathways. Preparation of multi-specific therapeutics can require preparation of each monomer separately, which are then combined or can require preparation of the multi-specific products in a single cell. This results in mixtures of species molecules, including, for example, in the case of bi-specific therapeutics, homodimers and heterodimers. Further purification then is employed to select the species that is the therapeutic. There is a need, not only for additional therapeutics, but a need to solve the problem of yields of species of interest. There also is a need for improved multi-specific therapeutics.

### SUMMARY

[0009] Provided are constructs that are chimeric chains that are components of heterodimers and homodimers, and other higher order forms depending upon the components. The constructs comprise an ECD linked directly or indirectly via a linker to a multimerization domain, such as an Fc. The ECD can be an affinity optimized ECD, and the multimerization domain is modified to increase half-life of the chain or multimer comprising the chain. Constructs provide herein, contain a HER1 ECD linked to an Fc, and/or a HER3 ECD linked to an Fc. Constructs provided herein include modifications to increase serum half-life, and optionally include modifications to increase affinity for targeted ligands. Nucleic acids, plasmids and cells containing the constructs are provided. The two chains encoded by the nucleic acids can be co-expressed in a cell to produce the mixture of multimeric products, such as mixtures of homodimers and heterodimers. The two chains can be expressed from separate promoters, or can be expressed as a polycistronic message, where the polycistronic message includes regulatory sequences, such as 2A polypeptides, that result in separate expression of the encoded chains. The nucleic acid can include signal sequences so that the expressed chains are secreted. Where co-expressed, the cell medium contains the mixtures, which then can be purified and formulated as pharmaceutical compositions. Provided are the cells and cell lines that contain nucleic acid encoding at least two chains, and cells and cell medium that comprise the mixtures resulting from expression of at least two chains. Methods for purification of heterodimers also are provided.

[0010] In accord therewith, provided are constructs, comprising two chains, where: one chain comprises an ECD from HER1 linked directly or indirectly to a Fc domain that is modified to increase the half-life of a homodimer or heterodimer comprising the Fc; the second chain comprises an ECD from HER3 linked directly or indirectly to a Fc domain that is modified to increase the half-life of a homodimer or heterodimer comprising the Fc. The ECDs can be full length, or can comprise a portion or portions of the ECDs sufficient to effect ligand or target binding or interaction.

[0011] Each of the ECDs or portion(s) thereof optionally is modified to have increased affinity for a ligand that binds to the ECD; such modified ECDs are referred to as oECDs. The constructs can comprise two chains, whereby the construct comprises a heterodimer or a homodimer. In embodiments herein, one chain comprises the sequence of amino acids set forth in SEQ ID NO: 657 or a sequence having at least 95%, 96%, 97%, 98%, or 99% sequence identity to the sequence of amino acids set forth in SEQ ID NO:657, whereby a homodimer or heterodimer comprising the chain binds to a ligand for the ECD; and the second chain comprises the sequence of amino acids set forth in SEQ ID NO: 659, or a sequence having at least 95%, 96%, 97%, 98%, or 99% sequence identity to SEQ ID NO: 659, whereby a homodimer or heterodimer comprising the chain binds to a ligand for the ECD.

[0012] Also provided are constructs that comprise two chains, whereby the construct comprises a heterodimer or a homodimer. One chain comprises the sequence of amino acids set forth in SEQ ID NO: 661 or a sequence having at least 95%, 96%, 97%, 98%, or 99% sequence identity to the sequence of amino acids set forth in SEQ ID NO: 661, whereby a homodimer or heterodimer comprising the chain binds to a ligand for the ECD; and the second chain comprises the sequence of amino acids set forth in SEQ ID NO:663, or a sequence having at least 95%, 96%, 97%, 98%, or 99% sequence identity to the sequence of amino acids set forth in SEQ ID NO: 663, whereby a homodimer or heterodimer comprising the chain binds to a ligand for the ECD. In other embodiments, one chain comprises the sequence of amino acids set forth in SEQ ID NO: 665 or a sequence having at least 95%, 96%, 97%, 98%, or 99% sequence identity to the sequence of amino acids set forth in SEQ ID NO: 665, whereby a homodimer or heterodimer comprising the chain binds to a ligand for the ECD; and the second chain comprises the sequence of amino acids set forth in SEQ ID NO:667, or a sequence having at least 95%, 96%, 97%, 98%, or 99% sequence identity to the sequence of amino acids set forth in SEQ ID NO: 667, whereby a homodimer or heterodimer comprising the chain binds to a ligand for the ECD.

[0013] In other embodiments, a chain comprises the sequence of amino acids set forth in SEQ ID NO: 669 or a sequence having at least 95%, 96%, 97%, 98%, or 99% identity to the sequence of amino acids set forth in SEQ ID NO: 669, whereby a homodimer or heterodimer comprising the chain binds to a ligand for the ECD; and the second chain comprises the sequence of amino acids set forth in SEQ ID NO:671, or a sequence having at least 95%, 96%, 97%, 98%, or 99% sequence identity to the sequence of amino acids set forth in SEQ ID NO: 671 whereby a homodimer or heterodimer comprising the chain binds to a ligand for the ECD.

[0014] Also provided are isolated cells and/or cell lines that comprise nucleic acid encoding chain 1 and nucleic acid encoding chain 2. For jurisdictions with restrictions regarding cells, the cells and cell lines a provided with the proviso that in jurisdictions that have prohibitions the cell or cell line is not a fetal cell or cell line or is not a zygote, or is not a cell that can develop into a human. The isolated cells or cell lines can be a mammalian cell or cell line, such as any cell or cell line suitable for production of the chains. For example, CHO cells and HK293 cells are exemplary. The isolated cell or cell line can contain nucleic acid encoding one or both chains, where the nucleic acid comprises a signal sequence for secretion of the operatively linked nucleic acid encoding one or both chains. Signal sequences are well known and include those suitable for expression in the particular cell or cell line. These include any described herein and any known to those of skill in the art.

[0015] Provided are methods of producing a composition comprising a mixture of homodimers and heterodimers; methods of isolating heterodimers also are provided. The methods for production include the step of culturing or growing the cell or cell line, such as those described above, under conditions, whereby the mixture of homodimers and heterodimers is expressed in the cell or a cell in the cell line. The mixture can be purified from the cells. Where the nucleic acid encodes secretion signals, whereby the mixture is secreted into the cell culture medium, the method can further comprise isolating or purifying the homodimer and heterodimer mixture from the cell culture medium. In all of these methods, the methods can further comprise formulating the mixture as a pharmaceutical composition or heterodimers or homodimers, which can then be administered to a subject for treatment of a disease, disorder, or condition that is mediated by or involves a targeted receptor or ligand, whereby inhibition thereof effects treatment.

[0016] Provided are pharmaceutical compositions comprising the mixtures. Included are pharmaceutical compositions that comprise a mixture of oligo-trap constructs comprising, in a pharmaceutically acceptable vehicle, a chimeric polypeptide chain that includes a multimerization domain, where the constructs comprise heteromultimers and homomultimers; and the heteromultimers bind to or interact with two different receptors or ligands or sites on a receptor or ligand. For example, the pharmaceutical compositions include those where the oligo-trap constructs (also referred to herein as chains or chimeric polypeptides or chimeric polypeptide chains). The chains can contain modifications to increase half-life, wherein modifications comprise insertions, deletions, or replacement of amino acids, and/or comprise linkage to moieties that increase half-life. The chains can be a heteromultimer, such as a heterodimer, and homomultimers, such as a homodimer. Provided herein are purified homomultimers, purified heteromultimers that contain the chains described herein that include modifications to increase serum half-life. Pharmaceutical compositions comprising the purified heteromultimers, such as the heterodimers, are provided. Purified homomultimers, such as homodimers, and pharmaceutical compositions comprising them also are provided. For example, provided are the pharmaceutical compositions that comprise construct mixtures that contain at least two chimeric polypeptide chains, where: the first chain comprises an extracellular domain (ECD) of HER1; and the second chain comprises an extracellular domain (ECD) of HER3. For example, these include pharmaceutical compositions, where at least one or more of the ECDs is an affinity optimized ECD (oECD) for increased affinity to a ligand therefor. Where the pharmaceutical compositions comprise heterodimers or mixtures thereof with homodimers, both ECDs can be affinity optimized.

[0017] Exemplary of the chains, constructs, and pharmaceutical compositions are those where: the HER1 ECD comprises the replacement T15S and G564S with reference to numbering in SEQ ID NO:415; and/or the HER3 ECD comprises the replacement G564S. In all embodiments herein, other replacements that achieve increased affinity, such as at least 1% or more, such as 5%, 10%, increased affinity are included. The particular increase depends upon the components, the mutations, the targeted receptor or ligand, and the particular disease, disorder, or condition treated.

[0018] Each of the chains can comprise a multimerization domain, whereby the chains form multimers. Fc domains are exemplary thereof. The Fc domains can comprise a full-length hinge or a portion of the hinge. The Fc domain can comprise replacements that result in increased half-life of the homodimers and/or heterodimers that comprise the chains. The Fc domain can be linked to the ECD directly or via a linker, including any described herein. Exemplary Fc domains comprise the sequence set forth in any of SEQ ID NOs: 672-675 or a sequence having at least 95%, 96%, 97%, 98%, or 99% sequence identity to the sequences of amino acids set forth in any of SEQ ID NOs: 672-675 that retain the multimerization activity, and optionally includes replacements that result in increased serum half-life of the homodimers and/or heterodimers that comprise the chain or chains that comprise the Fc. Exemplary of such Fc domains, are Fc domains in the construct(s) that comprises the replacements M428L and N434S, and/or M252Y, S254T, and T256E, where numbering of the Fc is EU numbering.

[0019] Exemplary of the chains, heterodimers, homodimers, mixtures, and pharmaceutical compositions are those in which one chain comprises the sequence of amino acids set forth in SEQ ID NO: 653, or a sequence having at least 95%, 96%, 97%, 98%, or 99% sequence identity to the sequence of amino acids set forth in SEQ ID NO:653, whereby a homodimer or heterodimer comprising the chain binds to a ligand for the ECD; and the second chain comprises the sequence of amino acids set forth in SEQ ID NO:655, or a sequence having at least 95%, 96%, 97%, 98%, or 99% sequence identity to the sequence of amino acids set forth in SEQ ID NO:655, whereby a homodimer or heterodimer comprising the chain binds to a ligand for the ECD. Other examples are chains, heterodimers, homodimers, constructs, and pharmaceutical compositions, where: one chain comprises the sequence of amino acids set forth in SEQ ID NO: 657 or a sequence having at least 95%, 96%, 97%, 98%, or 99% sequence identity to the sequence of amino acids set forth in SEQ ID NO: 657, whereby a homodimer or heterodimer comprising the chain binds to a ligand for the ECD; and the second chain comprises the sequence of amino acids set forth in SEQ ID NO:659, or a sequence having at least 95%, 96%, 97%, 98%, or 99% sequence identity to the sequence of amino acids set forth in SEQ ID NO: 659, whereby a homodimer or heterodimer comprising the chain binds to a ligand for the ECD. Other examples are pharmaceutical compositions, wherein one chain comprises the sequence of amino acids set forth in SEQ ID NO: 661 or a sequence having at least 95%, 96%, 97%, 98%, or 99% sequence identity to the sequence of amino acids set forth in SEQ ID NO: 661, whereby a homodimer or heterodimer comprising the chain binds to a ligand for the ECD; and the second chain comprises the sequence of amino acids set forth in SEQ ID NO:663, or a sequence having at least 95%, 96%, 97%, 98%, or 99% sequence identity to the sequence of amino acids set forth in SEQ ID NO: 663, whereby a homodimer or heterodimer comprising the chain binds to a ligand for the ECD. In other examples one chain comprises the sequence of amino acids set forth in SEQ ID NO: 665 or a sequence having at least 95%, 96%, 97%, 98%, or 99% sequence identity to the sequence of amino acids set forth in SEQ ID NO: 665, whereby a homodimer or heterodimer comprising the chain binds to a ligand for the ECD; and the second chain comprises the sequence of amino acids set forth in SEQ ID NO:667, or a sequence having at least 95%, 96%, 97%, 98%, or 99% sequence identity to the sequence of amino acids set forth in SEQ ID NO: 667, whereby a homodimer or heterodimer comprising the chain binds to a ligand for the ECD. Other examples of include those where one chain comprises the sequence of amino acids set forth in SEQ ID NO: 669 or a sequence having at least 95%, 96%, 97%, 98%, or 99% sequence identity to the sequence of amino acids set forth in SEQ ID NO: 669, whereby a homodimer or heterodimer comprising the chain binds to a ligand for the ECD; and the second chain comprises the sequence of amino acids set forth in SEQ ID NO:671, or a sequence having at least 95%, 96%, 97%, 98%, or 99% sequence identity to the sequence of amino acids set forth in SEQ ID NO: 671, whereby a homodimer or heterodimer comprising the chain binds to a ligand for the ECD.

[0020] In all embodiments herein, where a particular polypeptide sequence or encoding nucleic acid is included, it is understood that variants thereof that share least 95%, 96%, 97%, 98%, 99%, or more amino acid sequence identity also can be included as long as the resulting polypeptide retains activity and/or a characteristic property, such as increased half-life, or affinity, or activity. For example, if a polypeptide has been modified to increase serum half-life, variants will exhibit the increased half-life and include the modifications that effect such property. Variants include species and allelic variants. By virtue of the degeneracy of the genetic code, nucleic acid molecules can have much lower sequence identity, even less than 70%, where variation is achieved by including codons that encode the amino acid modifications, and also degenerate codons.

[0021] Also provided are methods for purification of a heterodimer from among heterodimers and homodimers resulting from co-expression of nucleic acid encoding two of the chains of an oligo-trap polypeptide, including any provided herein, such as those described above that comprise a chain that contains an Fc and ECD. In one method, one chain of the heterodimer comprises a modification or modifications to ablate binding to an affinity chromatography resin, where the method comprises: separating of the heterodimers and homodimers that comprise the modified chain from the other homodimers by the affinity chromatography resin; and separating the heterodimers from homodimers in the resulting mixture by cation exchange chromatography. For example, the Fc of one chain comprises a modification or modifications to ablate binding to an affinity chromatograph resin, such as protein A resin. The method of claim Z2, wherein the modification(s) comprise the replacements H435R and Y436F in the IgG1 Fc. In step 1 of the method, the mixture of heterodimers and homodimers is contacted with protein A resin to produce a mixture of the heterodimers and the homodimers that contain the modified FC. In step 2 of the method, the resulting mixture is subjected to cation exchange chromatography, which separates the heterodimers from homodimers.

[0022] In an alternative method, which does not require modification of the Fc's to ablate binding to an affinity chromatograph resin, the mixture of heterodimers and homodimers resulting from co-expression of two chains, such as those that contain and ECD and Fc, by first running HER1/Fc and HER3/Fc homodimers as column chromatograph retention time (RT) markers; and then separating the heterodimers from the homodimers based on the RT markers.

[0023] Pharmaceutical compositions comprising mixtures of the homodimers and heterodimers are provided. Also provided are pharmaceutical compositions comprising the purified heterodimers.

[0024] In the chimeric polypeptides, as well as in the resulting homomultimers and heteromultimers, the ECD or portion thereof of one or both of the chimeric polypeptides comprises one or more amino acid modifications whereby binding affinity for its cognate receptor is increased and/or dimerization or other activity is increased. In some embodiments, one or both of the ECDs is all or a portion of the ECD of member of the EGFR family. In some embodiments, all or the portion of the two of the ECDs is member of the EGFR family. When the chimeric polypeptides contain a portion of an ECD, the portion is sufficient for binding to its cognate receptor and/or for receptor dimerization, or other activity or property. In some embodiments, one or more of the ECDs is an EGFR family member selected from among HER1 (EGFR1), HER2, HER3, and HER4, such as HER1 and HER3.

[0025] On or more of the ECDs in the homomultimers and heteromultimers can be optimized for binding to its cognate receptor. The ECD portion of the homomultimers and heteromultimers can be full-length or can be a sufficient portion to effect binding to the cognate receptor or for dimerization or other activity. In the homomultimers and heteromultimers one or two or more of the chimeric polypeptides comprise an ECD that is a fused ECD comprising all or a portion of two different ECDs, the resulting chimeric polypeptide binds to ligands for both of the ECDs. The chimeric polypeptides can comprise fused ECDs, so that the fused ECDs interact with ligands for each ECDs. For example, at least two of the chimeric polypeptides comprise fused ECDs, and at least three of the ECDs are different. At least two of the chimeric polypeptides comprise fused ECDs; and four of the ECDs are different, whereby the chimeric polypeptides contain fusion of different ECDs. In any embodiment herein, the multimers (homomultimers and heteromultimers) are dimers.

[0026] The heterodimers comprise a first chimeric polypeptide, and a second chimeric polypeptide; the homodimers comprise the first chimeric polypeptide as a dimer, or the second chimeric polypeptide as a dimer; the first chimeric polypeptide contains a full-length extracellular domain (ECD) from HER1 receptor linked directly or indirectly via a linker to a multimerization domain or contains less than the full length of the ECD of HER1 and/pr HER3 receptor linked directly or indirectly via a linker to a multimerization domain; the ECD in the first chimeric polypeptide contains at least a sufficient portion of subdomains I and/or III to bind to a ligand of the receptor and a sufficient portion of the ECD, including a sufficient portion of subdomain II, to dimerize with a cell surface receptor, unless the ECD in the chimeric polypeptide is from a HER2 receptor, then it also contains all or part of domain IV, including a sufficient portion or all of modules 2-5 of subdomain IV to effect dimerization with a cell surface receptor; the second chimeric polypeptide is linked directly or indirectly via a linker to a multimerization domain, and contains at least a sufficient portion of an ECD of a cell surface protein to bind to ligand therefor and/or to dimerize with a cell surface receptor, wherein the multimerization domains in the first and second chimeric polypeptides are complementary or the same, with the proviso that if the first chimeric polypeptide is a full length HER1 ECD, then the second chimeric polypeptide does not contain an ECD from HER2 or if it does, the HER2 ECD is less than full length and the sufficient portion for receptor dimerization includes a sufficient portion of domain IV to effect dimerization, whereby: the chimeric polypeptides form homodimers and form heterodimers bind to additional ligands compared to the first chimeric polypeptide or a homodimer thereof and/or dimerize with more cell surface receptors than the first chimeric polypeptide or a homodimer thereof. The heteromultimer comprises all or part of the extracellular domain (ECD) from HER1 receptor; and all or part of the ECD from HER3, and the part includes at least subdomains I, II and III.

[0027] The first and second chimeric polypeptides comprise an ECD and a multimerization domain; the heteromultimer comprises two different extracellular domains (ECDs) of a ligand, and is a multimerization domain; one or both of the ECDs and/or the multimerization domain in the heteromultimer is modified to alter binding of the ECD(s) or an activity or property of the multimerization domain; and the multimerization domain is linked to an ECD directly or via a linker.

[0028] The homomultimers can comprise a first chimeric polypeptide; the homomultimers comprise a second chimeric polypeptide; the heteromultimers comprise the first and second chimeric polypeptides; the chimeric polypeptides comprise an ECD and a multimerization domain, whereby the heteromultimers comprise a first ECD polypeptide and a second ECD polypeptide that each are linked directly or indirectly via the linker to the multimerization domain; the first and second ECD polypeptides are different; and the first and second ECD polypeptides are selected from an ECD that comprises an ECD selected from among:
[0029] the ECD of HER1/EGFR, corresponding to residues 1-621 of SEQ ID NO:415, or a portion thereof, or a variant thereof that has at least 95% or 98% sequence identity to SEQ ID NO:415;
[0030] the ECD polypeptide comprises the ECD of HER2, corresponding to residues 1-628 of SEQ ID NO:424, or a portion thereof, or a variant thereof that has at least 95% or 98% sequence identity to SEQ ID NO:424;
[0031] the ECD polypeptide comprises the ECD of HER3, corresponding to residues 1-621 of SEQ ID NO:416, or a portion thereof, or a variant thereof that has at least 95% or 98% sequence identity to SEQ ID NO:416;
[0032] the ECD polypeptide comprises the ECD of HER4, corresponding to residues 1-625 of SEQ ID NO:425, or a portion thereof, or a variant thereof that has at least 95% or 98% sequence identity to SEQ ID NO:425; and
[0033] the portion or variant of each ECD can effect ligand binding, and/or can dimerize with a cell surface receptor.

[0034] In some embodiments, the homomultimers comprise a first chimeric polypeptide that comprises a first ECD polypeptide and a multimerization domain; the homomultimers comprise a second chimeric polypeptide a second ECD polypeptide and a multimerization domain; the heteromultimers comprise the first and second chimeric polypeptides; the first ECD polypeptide comprises the ECD of HER1/EGFR, corresponding to residues 1-621 of SEQ ID NO:415, or a portion thereof, or a variant thereof that has at least 95% or 98% sequence identity to SEQ ID NO:415; the second ECD polypeptide comprises the ECD of HER2, corresponding to residues 1-628 of SEQ ID NO:424, or a portion thereof, or a variant thereof that has at least 95% or 98% sequence identity to SEQ ID NO:424; or the second ECD polypeptide comprises the ECD of HER3, corresponding to residues 1-621 of SEQ ID NO:416, or a portion thereof, or a variant thereof that has at least 95% or 98% sequence identity to SEQ ID NO:416; or the second ECD polypeptide comprises the ECD of HER4, corresponding to residues 1-625 of SEQ ID NO:425, or a portion thereof, or a variant thereof that has at least 95% or 98% sequence identity to SEQ ID NO:425; and the portion or variant of each ECD retains sufficient affinity for ligand binding, and/or ability to dimerize with a cell surface receptor.

[0035] In some embodiments, the heteromultimer comprises an ECD or portion thereof from HER1 and another ECD or portion thereof from HER3 and wherein the homomultimers comprise an ECD or portion thereof from HER1 or an ECD or portion thereof from HER3.

[0036] Provided are pharmaceutical compositions containing the heterodimers, or mixtures of the heterodimers and homodimers in a pharmaceutically acceptable vehicle, a mixture of heteromultimers and homomultimers wherein the heteromultimer comprises an ECD or portion thereof from one receptor or ligand, such as HER1, and another ECD or portion thereof from different receptor or ligand, such HER3, whereby the heteromultimers comprise two or more different ECDs, such as an ECD or portion thereof from HER1 and an ECD or portion thereof from HER3. The ECD can be enhanced for ligand or other binding and/or biological activity, such as receptor binding. In one example of a heteromultimer, the HER1 portion has been enhanced for ligand binding and/or biological activity. In other aspects, the HER3 portion has been enhanced for ligand binding and/or biological activity. In yet another aspect, the HER1 and HER3 portions have been enhanced for ligand binding and/or biological activity. The compositions also contain homomultimers, such as homodimers, and other species, depending upon the components of the monomers.

[0037] Of interest herein are any such therapeutics, particularly bi-specific anti-cancer therapeutics that target two or more different ligands and/or cell surface receptors (CSRs). The approach and methods herein can be applied to any therapeutic that contains at least two different monomeric species or components, such as any bi-specific therapeutic, such as bi-specific antibodies or other such constructs.

[0038] Provided herein are therapeutics and candidate therapeutics and methods for identifying or discovering candidate therapeutics. Methods of treatment using such therapeutics are provided. The therapeutics are designed to be pan cell surface receptor therapeutics in that they specifically target more than one cell surface receptor, such as via binding to ligands for one or more receptors and/or interacting with one or more cell surface receptors, as long as the activity of more than one cell surface receptor is modulated. The therapeutics include those that target more than one HER receptor as well as those that target one or more HER receptors and additional receptors, such as a HER receptor that contributes or participates in development of resistance to anti-HER therapies. In particular embodiments, the therapeutics and candidate therapeutics are designed to address problems, including limited efficacy and development of resistance, associated with limitations on the effectiveness of anti-HER therapeutics.

[0039] In some embodiments, at least one of the ECD domains or portion thereof, includes a mutation that alters ligand binding or other activity compared to the form lacking such mutation. In such multimers, a second ECD portion can be the same ECD domain, wildtype, or mutated form, or the ECD from any other cell surface receptor. As above, the ECD or portion thereof of each monomer is linked to a multimerization domain or is linked to a second ECD or portion thereof directly or via a linker. Exemplary of such multimers, are multimers that contain at least one HER1 ECD that contains a mutation in subdomain III that increases its affinity for a ligand other than EGF. Such increase in affinity is at least 10-fold, typically 100, 1000, 10⁴, 10⁵, 10⁶ or more.

[0040] Also provided are multimers that contain modified ECDs, such as an ECD or plurality thereof whose ligand binding affinity is altered. For example, EGFR1, which is activated by EGF and generally is not stimulated by NRG-2β, has been modified so that both ligands interact with the EGFR ECD to promote receptor dimerization/receptor signaling (see, Gilmore et al. (2006) Biochem J 396:79-88, which shows that NRG2β is a more potent stimulus of the EGFR mutant than of wild-type. The sequence of an exemplary modified EGFR, EGFR-S442F, is set forth in SEQ ID NO:414 in which the ECD begins at amino acid 25. The ECD (of SEQ ID NO:414; the position of the modification is at locus 442 with reference to a sequence of the ECD that includes the first 25 amino acid signal sequence and is at 418 when referencing the mature form) or a portion thereof or a corresponding portion of an allelic or species variant thereof containing at least a sufficient portion of domains I-III to bind to EGFR1 and NRG-2β (or at least a sufficient portion of modified domain III for binding to NRG-2β) can be employed in the multimers provided herein as well as in the chimeras and other PAN-cell surface therapeutics provided herein. The ECDs provided herein or known to those of skill in the art can be modified to alter ligand binding specificity, such as with a modification corresponding to that of the exemplified modification. The ECD from EGFR-S442F, as well as from other ECDs modified to interact with ligands specific for different ECDs, can be employed as Pan-cell surface receptor therapeutics, particularly when linked to a multimerization domain, such as an Fc domain. These modified ECDs can be employed in all embodiments described herein. Hence, provided herein are homo-multimers of modified ECDS of receptors that interact with at least two ligands, where each ligand interacts with a different wild-type ECD.

[0041] The multimer provided herein can be one where the ECD of one or both of the first and second chimeric polypeptides is/are a hybrid ECD that contains subdomains from at least two different cell surface receptor ECDs. Also included herein are multimers, where the first chimeric polypeptide can contain less than the full-length of the ECD of HER2, HER3, or HER4. Most often, the first chimeric polypeptide contains less than the full-length of the ECD of HER3 or HER4.

[0042] Additionally, the ECD portion of the second polypeptide in the multimer provided herein includes those where the ECD portion of the second polypeptide is not HER1, but contains all or a portion of an ECD of another CSR. In some instances, the other ECD portion includes those where the ECD domain of the second chimeric polypeptide is from HER3 or HER4.

[0043] Also included among ECD multimers provided herein are those where the second chimeric polypeptide includes an ECD polypeptide that is a full-length ECD. Alternatively, the truncated ECD domain of the second chimeric polypeptide includes a ECD domain of the second chimeric polypeptide is truncated and contains at least a sufficient portion of subdomains I, II, and III to bind to its ligand and to dimerize with a cell surface receptor. In some cases, the truncated ECD domain of the second chimeric polypeptide includes a sufficient portion of domains I and III to bind ligands. In other embodiments, a sufficient portion of the ECD is present to dimerize with a cell surface receptor.

[0044] Also included are multimers that contain an ECD domain that is modified to alter ligand binding or other activity of the ECD or of multimers that contain a full-length receptor containing such an ECD compared to the unmodified ECD or full-length receptor. Alteration includes elimination or addition of ligand binding. For example, the ECD can be modified to bind to additional ligands compared to the unmodified ECD. Such modification includes a modification at S442 (e.g., SEQ ID. NO: 2) or a corresponding position of a HER receptor, whereby the ECD binds to ligands for HER3, such as NRG-20, as well ligands, such as EGF, for HER1.

[0045] These multimers can include an ECD or portion thereof from HER1 and from HER3 or HER4, whereby the resulting multimer interacts with ligands for at least two, three, four, five, six or seven HER receptors. Dimers are included among the multimers. The multimerization domains include any known to those of skill in the art, including any listed above or below, such as an Fc domain or variant thereof.

[0046] The multimerization domain of the first and second polypeptide in the heteromultimers in the compositions provided herein include any multimerization domain from among an immunoglobulin constant domain (Fc), a leucine zipper, complementary hydrophobic regions, complementary hydrophilic regions, compatible protein-protein interaction domains, and free thiols that form an intermolecular disulfide bond between two molecules. In some embodiments, the multimerization domain is an Fc domain or a variant thereof that effects multimerization. The Fc domain can be from any immunoglobulin molecule including from an IgG, IgM, or IgE.

[0047] In some examples, the multimer in a composition provided herein includes as a first chimeric polypeptide one that contains either i) a full-length ECD from a HER1 receptor, or ii) a portion thereof sufficient to bind ligands and/or dimerize and as a second chimeric polypeptide all or a portion of the ECD of HER3 of HER4 sufficient to bind to ligands and/or to dimerize.

[0048] Any of the multimers in the compositions provided herein include component chimeric polypeptides linked to a multimerization domain where the multimerization domain can be any of an immunoglobulin constant region (Fc), a leucine zipper, complementary hydrophobic regions, complementary hydrophilic regions, compatible protein-protein interaction domains, and free thiols that form an intermolecular disulfide bond between two molecules, so the monomers form stable multimers. Such multimers, through interactions of their multimerization domain, are oriented in a back-to-back configuration where the ECD of both chimeric polypeptides are available for dimerization with a cell surface receptor. In one example, the multimerization domain is an Fc domain. The Fc domain can be from any immunoglobulin molecule, such as from an IgG, IgM, or IgE.

[0049] Also included among the multimers provided herein are those where one of the constituent chimeric polypeptides is a fusion polypeptide. In some embodiments, the first chimeric polypeptide and the second chimeric polypeptide are fusion polypeptides. In other examples, a constituent chimeric polypeptide is formed by chemical conjugation. In one embodiment, both of the first chimeric polypeptide and second chimeric polypeptide are formed by chemical conjugation. In additional examples, the multimerization domain of at least one of the chimeric polypeptides is linked directly to the ECD. Alternatively, the multimerization domain of one of the chimeric polypeptides is linked via a linker to an ECD polypeptide. In some embodiments of this, the multimerization domain of each of the first and second chimeric polypeptides are linked to each respective ECD via a linker. The linker can be a chemical linker or a polypeptide linker.

[0050] The compositions provided herein include heterodimers, homodimers, and can include higher order multimers, including heteromultimers, formed upon expression of the chimeric polypeptide chains. Heterodimer include those in which one of the component chimeric polypeptides are in a back-to-back configuration, such that the ECD in each chimeric polypeptide is available for dimerization with a cell surface receptor.

[0051] Included among heteromultimers in the compositions provided herein are those where each ECD is linked directly or via a linker to a multimerization domain such that the multimerization domain of at least two ECDs interact to form a heteromultimer. The multimerization domain of each of the ECDs in the heteromultimer include any of an immunoglobulin constant (Fc) domain, a leucine zipper, complementary hydrophobic regions, complementary hydrophilic regions, compatible protein-protein interaction domains, and free thiols that from an intermolecular disulfide bond between two molecules. In some embodiments, the multimerization domain is an Fc domain. The Fc domain can be from any immunoglobulin molecule including from an IgG, IgM, or IgE.

[0052] The heteromultimers provided herein can include hybrid ECDs that each contain all or a part of at least domain I, II, and III of an ECD of one or more CSR such that at least two of the domains are from ECDs of different cell surface receptors and the hybrid ECD contains a sufficient portion of an ECD of a cell surface receptor, including a sufficient portion of domain II, to dimerize with a cell surface receptor when the hybrid ECD is linked to a multimerization domain and/or sufficient portions of ligand binding domains to interact with the ligand for the ECD from which the ECD domain or portion thereof is derived. In some embodiments, the cell surface receptor is a member of the HER family. Thus, for example, domain I is from HER1, domain II is from HER2, and domain III is from HER3. In another embodiment domains I and III are from an ECD containing a mutation in domain III that renders domain III able to bind to a ligand for HER3 or HER4.

[0053] Hybrid ECDs include, for example, those that contain a subdomain or portion thereof from an ECD that contains a mutation in the subdomain that alters ligand binding or specificity. Exemplary of such mutations are those described above, and below, such as a modification of HER1 whereby the modified HER1 interacts with two or more ligands, such as EGF and NRG-20.

[0054] The compositions provided herein can contain chimeric polypeptides that contain an ECD or portion thereof of a HER1 receptor linked to a multimerization domain, such as any listed above, where ECD or portion thereof includes a modification(s), whereby the ECD binds to an additional ligand compared to the unmodified ECD or portion thereof. Exemplary of such polypeptides are chimeric polypeptides containing all or a portion of a contiguous sequence of amino acids from residues 25-645 of SEQ ID NO:414 or having at least about 70, 80, 90, or 95% sequence identity thereto and including a mutation, such as Ser to Phe at a position corresponding to 442 of SEQ ID NO:414, that alters ligand binding, linked to a multimerization domain. The alteration in ligand binding includes a modification such that the ECD of HER1 also binds to HER3 ligands, such as NRG-20. For example, chimeric polypeptides containing a multimerization domain and a sufficient portion of the ECD of a modified HER1 to interact with EGF and NRG-20.

[0055] Included among chimeric polypeptides in the multimers and heteromultimers are chimeric polypeptides that contain a multimerization domain linked directly or indirectly via a linker to the polypeptide set forth as amino acids 25-645 of SEQ ID NO:414 or a portion thereof sufficient to effect ligand binding to at least two different ligands. These chimeric polypeptides also are provided.

[0056] In some embodiments, the multimerization domain of the chimeric polypeptide or of the heteromultimer can be any of an immunoglobulin constant region (Fc), a leucine zipper, complementary hydrophobic regions, complementary hydrophilic regions, compatible protein-protein interaction domains, and free thiols that form an intermolecular disulfide bond between two molecules, such that the chimeric polypeptides in the heteromultimer interact in a back-to-back configuration where the ECD of both chimeric polypeptides are available for dimerization with a cell surface receptor. In some cases, the multimerization domain is an Fc domain. The Fc domain can be from any immunoglobulin molecule including an IgG, IgM, or an IgE.

[0057] The compositions provided herein can contain, among the mixture of species, polypeptides containing a sequence of amino residues set forth in any of SEQ ID NOs: 127, 141, 146, 153, 155, 157, 159, 297, or 299 linked to a multimerization domain to provide for a chimeric polypeptide. The compositions provided herein can contain, among the mixture of species, a heteromultimer that contains a chimeric polypeptide having an amino acid sequence set forth in any of SEQ ID NOs:127, 141, 146, 153, 155, 157, 159, 297, or 299 and a sequence for a multimerization domain. The heteromultimer can contain as a second polypeptide, a HER ECD, or portion thereof sufficient for ligand binding and/or receptor dimerization.

[0058] Mixtures of nucleic acid molecules encoding a chimeric polypeptide or at least one chimeric polypeptide in the multimers or heteromultimers, including the hybrid ECDs are described herein, as are vectors containing the nucleic acid molecules, and cells containing a vector as described herein.

[0059] Provided herein are methods of treating a disease or condition by administering any of the pharmaceutical compositions described herein. Diseases or conditions treated include cancer, inflammatory disease, an angiogenic disease, or a hyperproliferative disease. Exemplary of cancers include pancreatic, gastric, head and neck, cervical, lung, colorectal, endometrial, prostate, esophageal, ovarian, uterine, glioma, bladder, renal, or breast cancer. Included among diseases to be treated is a proliferative disease. Exemplary of proliferative diseases include those that involve proliferation and/or migration of smooth muscle cells, or a disease of the anterior eye, a diabetic retinopathy, or psoriasis. Other exemplary diseases to be treated include restenosis, ophthalmic disorders, stenosis, atherosclerosis, hypertension from thickening of blood vessels, bladder diseases, and obstructive airway diseases. Other exemplary diseases include diseases or conditions associated with, e.g., caused by, or aggravated by, exposure to one or more Neuregulin (“NRG”), such as NRG1, including type I, II, and III, NRG2, NRG3, and/or NRG4. Examples of NRG-associated diseases include neurological or neuromuscular diseases, including schizophrenia and Alzheimer's disease.

[0060] Provided herein are methods of treating cancer by administering any of the pharmaceutical compositions provided herein alone or in a combination regimen with another anti-cancer agent or treatment. The anti-cancer agent includes radiation and/or a chemotherapeutic agent. In one example, the anti-cancer agent includes a tyrosine kinase inhibitor or an antibody. Exemplary of anti-cancer agents include a quinazoline kinase inhibitor, an antisense or siRNA or other double-stranded RNA molecule, an antibody that interacts with a HER receptor, and antibody conjugated to a radionuclide, or a cytotoxin. Other exemplary anti-cancer agents include Gefitinib, Lapatinib (variations sold under the tradename Tykerb® or Tyverb®), Panitumumab, Erlotinib, Cetuximab, Trastuzumab, Imatinib, a platinum complex or nucleoside analog.

[0061] Provided herein are methods of treatment of a HER-mediated disease including testing a subject with the disease to identify which HER receptors are expressed or overexpressed and based on the results, selecting a multimer that targets at least one, typically, two of the HER receptors. In one embodiment, the disease is a cancer. Exemplary of cancers include pancreatic, gastric, head and neck, cervical, lung, colorectal, endometrial, prostate, esophageal, ovarian, uterine, glioma, bladder, or breast cancer.

[0062] Described herein are methods for identifying candidate therapeutic molecules that interact with HER receptors by first contacting a test molecule or collection thereof with a polypeptide of at least 6 amino acids or 6 amino acids up to about 50 amino acids or 50 amino acids based upon regions in domains II and IV or I and III that are involved in any of dimerization, ligand binding, and/or tethering and then identifying and selecting any test molecule that interacts with one or more of the polypeptides. In one embodiment, the polypeptides are contained within a library that is a combinatorial library of polypeptides based upon the HER receptors. Exemplary of polypeptides for which the test molecule can be contacted include any of having a sequence of amino acids set forth in any of SEQ ID NOs: 54-125, and portions of any of the polypeptides that have 4, 5, 6, 8, 10, 12, or more amino acid residues thereof, or 5 SEQ ID NO:405, and portions thereof that have 6, 8, 10, 12, 14, 15, 18, 20, 25, 30, 35, 40, 45, or 50 or more amino acid residues thereof. Among the library of molecules are those that contain polypeptides on a solid support or on the surface of a virus. In one example, the polypeptides are contained within a phage display library.

[0063] In one embodiment, the test molecules are a library of molecules. Thus, in one example, the test molecules include those in a phage display library. In another embodiment, the molecules are small organic compounds or polypeptides. In a method described herein, test molecules are selected that bind to a domain I and/or domain III, or to domain II or to domain IV. In one aspect of the method, a heterodimer of two or more polypeptide test molecules identified is made where one of the peptides of the heterodimer binds to domain II and the other binds to domain IV.

[0064] The homomultimers and heteromultimers in the pharmaceutical compositions can include a multimerization domains (that is an Fc or is a modified Fc). For example, that multimerization domain comprises a modified Fc, wherein the Fc or IgG Fc comprises one or both of the following modifications: a) a modification(s) to increase or enhance neonatal Fc receptor (FcRn) recycling; and b) a modification(s) to reduce or eliminate immune effector functions. In embodiments, where the Fc comprises one or more modifications to increase or enhance FcRn recycling that is/are selected from among one or more of:
[0065] T250Q, T250R, M252F, M252W, M252Y, S254T, T256D, T256E, T256Q, V259I, V308F, E380A, M428L, H433K, N434F, N434A, N434W, N434S, N434Y, Y436H, M252Y/T256Q, M252F/T256D, M252Y/S254T/T256E, H433K/N434F/Y436H, N434F/Y436H, T250Q/M428L, T250R/M428L, M428L/N434S, V259I/V308F, V259I/V308F/M428L, E294del/T307P/N434Y, and T256N/A378V/S383N/N434Y, by EU numbering.

[0066] In some embodiments one or more of the multimerization domains is/are an Fc that comprises modifications to immune effector functions, such as functions that are selected from among one or more of complement-dependent cytotoxicity (CDC), antibody-dependent cell-mediated cytotoxicity (ADCC) and antibody-dependent cell-mediated phagocytosis (ADCP). For example, the Fc can comprise one or more modification(s) to reduce or eliminate immune effector functions that are selected from among one or more of:
[0067] in IgG1: L235E, L234A/L235A, L234E/L235F/P331S, L234F/L235E/P331S, L234A/L235A/P329G, L234A/L235A/G237A/P238S/H268A/A330S/P331S, G236R/L328R, G237A, E318A, D265A, E233P, N297A, N297Q, N297D, N297G, N297G/D265A, A330L, D270A, P329A, P331A, K322A, V264A, and F241A, by EU numbering; and in IgG4: L235E, F234A/L235A, S228P/L235E, and S228P/F234A/L235A, by EU numbering.

[0068] In other embodiments, the Fc is an IgG Fc that comprises one or more of the following modifications:
[0069] a) a modification(s) to increase or enhance neonatal Fc receptor (FcRn) recycling, wherein the modification is selected from among one or more of:
[0070] T250Q, T250R, M252F, M252W, M252Y, S254T, T256D, T256E, T256Q, V259I, V308F, E380A, M428L, H433K, N434F, N434A, N434W, N434S, N434Y, Y436H, M252Y/T256Q, M252F/T256D, M252Y/S254T/T256E, H433K/N434F/Y436H, N434F/Y436H, T250Q/M428L, T250R/M428L, M428L/N434S, V259I/V308F, V259I/V308F/M428L, E294del/T307P/N434Y, and T256N/A378V/S383N/N434Y, by EU numbering; and
[0071] b) a modification(s) to increase or enhance immune effector functions, where:
[0072] the immune effector functions are selected from among one or more of CDC, ADCC and ADCP; and
[0073] the modification(s) to increase or enhance immune effector functions is selected from among one or more of:
[0074] in IgG1: S239D, 1332E, S239D/I332E, S239D/A330L/I332E, S298A/E333A/K334A; F243L/R292P/Y300L/V305I/P396L; L235V/F243L/R292P/Y300L/P396L; F243L/R292P/Y300L; L234Y/G236W/S298A in the first heavy chain and S239D/A330L/I332E in the second heavy chain; L234Y/L235Q/G236W/S239M/H268D/D270E/S298A in the first heavy chain and D270E/K326D/A330M/K334E in the second heavy chain; A327Q/P329A; D265A/S267A/H268A/D270A/K326A/S337A; T256A/K290A/S298A/E333A/K334A; G236A; G236A/I332E; G236A/S239D/I332E; G236A/S239D/A330L/I332E; introduction of a biantennary glycan at residue N297; introduction of an afucosylated glycan at residue N297; K326W; K326A; E333A; K326A/E333A; K326W/E333S; K326M/E333S; K222W/T223W; K222W/T223W/H224W; D221W/K222W; C220D/D221C; C220D/D221C/K222W/T223W; H268F/S324T; S267E; H268F; S324T; S267E/H268F/S324T; G236A/I332E/S267E/H268F/S324T; E345R; and E345R/E430G/S440Y; by EU numbering.

[0075] In embodiments the Fe or IgG1 Fc can be modified to increase binding to the inhibitory Fcγ receptor (FcγR) FcγRIIb. For example, the Fc can comprise modifications that increase binding to FcγRIIb that are selected from among one or more of S267E, N297A, L328F, L351S, T366R, L368H, P395K, S267E/L328F and L351S/T366R/L368H/P395K, by EU numbering.

[0076] In the pharmaceutical compositions the ECD can comprise modifications, such as amino acid insertions, deletions, and replacements, such as modifications that increase binding affinity, such as by at least 1%, 5%, 10% or more for its cognate receptor or increase dimerization activity or other activity, or, in some instances eliminate binding to a site that is not of interest or eliminate an activity. In some embodiments, the ECD is one or more of EGFR/HER1, HER2, HER3 or HER4 or a portion or modified form thereof.

[0077] In some embodiments, the ECD is linked directly to the multimerization domain; in others it is linked via linkers, such as a linker that increases or provides flexibility, and/or reduces steric hindrance, and/or increases solubility, and/or relieves or reduces steric hindrance, or Van der Waals interactions. Exemplary linkers include a hinge region, and linkers that comprise G and S residues. For example, the linker has the sequence set forth in any of SEQ ID NOs: 427-449, or is a PEG moiety linker, or the linker comprises a hinge region, or is a linker comprising G and S residues or is an IgG1 or an IgG4 Fc. Exemplary linkers include one or more linkers selected from:
[0078] i) a GS linker selected from (GlySer)n, where n=1-10; (GlySer2); (Gly4Ser)n, where n=1-10; (Gly3Ser)n, where n=1-5; (SerGly4)n, where n=1-5; (GlySerSerGly)n, where n=1-5; GSGGSSGG; GSSSGSGSGSSG; GSSSGSGSGSSGG; GGSSGG; GGSSGGSGGSSSG; GSSSGSGSGGSSSGSGSG; GGSSGGSSGGGSSGGSSG; and GSSSGS; and/or
[0079] ii) all or a portion of the hinge sequence of trastuzumab, corresponding to residues 219-233 of SEQ ID NO:450, or all or a portion of the hinge sequence of nivolumab, corresponding to residues 212-223 of SEQ ID NO:451; and
[0080] iii) an IgG1 or IgG4 Fc, wherein:
[0081] the IgG1 Fc is selected from the IgG1 Fc of human IgG1, set forth in SEQ ID NO:452, or the IgG1 Fc of trastuzumab, set forth in SEQ ID NO:453;
[0082] the IgG4 Fc is selected from the IgG4 Fc of human IgG4, set forth in SEQ ID NO:454, or the IgG4 Fc of nivolumab, set forth in SEQ ID NO:455; and
[0083] optionally, the Fc includes one or more modifications to increase or enhance neonatal Fc receptor (FcRn) recycling, and/or reduce or eliminate immune effector functions. For example, the linker can linker comprise all or a portion of the hinge sequence of nivolumab, corresponding to residues 212-223 of SEQ ID NO:451, or
[0084] the linker comprises an IgG1 or IgG4 Fc;
[0085] the IgG1 Fc is selected from the IgG1 Fc of human IgG1, set forth in SEQ ID NO:452, or the IgG1 Fc of trastuzumab, set forth in SEQ ID NO:453;
[0086] the IgG4 Fc is selected from the IgG4 Fc of human IgG4, set forth in SEQ ID NO:454, or the IgG4 Fc of nivolumab, set forth in SEQ ID NO:455; and
[0087] optionally, the Fc includes one or more modifications to increase or enhance neonatal Fc receptor (FcRn) recycling, and/or reduce or eliminate immune effector functions.

[0088] In an exemplary embodiment, at least one chimeric polypeptide or multimer comprises a linker; and the linker comprises all or a portion of the hinge sequence of trastuzumab, SCDKTH corresponding to residues 222-227 of SEQ ID NO:450 or up to the full sequence of the hinge region of trastuzumab, that contains or has the sequence EPKSCDKTHTCPPCP (corresponding to residues 219-233 of SEQ ID NO:450), or at least 5, 6, 7, 8, 9, 10, or 11 contiguous residues thereof, or residues ESKYGPPCPPCP residues 212-223 of SEQ ID NO:451, or a sequence having at least 98% or 99% sequence identity thereto that is a linker. The linker can comprises a GS linker and all or a portion of the hinge sequence of trastuzumab, corresponding to residues EPKSCDKTHTCPPCP (219-233 of SEQ ID NO:450) or starting at the DKTHT or DKTH (residues 224-233, or 224-232 of SEQ ID NO:450 or corresponding residues from other Fc hinge regions), or the linker comprises a GS linker and comprises the sequence SCDKTH (or DKTH), corresponding to residues 217-222 of SEQ ID NO:456, the linker is selected from one or more of a linker that:
[0089] comprises a GS linker and all or a portion of the hinge sequence of nivolumab, corresponding to residues 212-223 of SEQ ID NO:451;
[0090] comprises (Gly4Ser)3;
[0091] comprises (Gly4Ser)3 and SCDKTH (residues 217-222 of SEQ ID NO:456);
[0092] comprises (Gly4Ser)3 and the hinge sequence of trastuzumab, corresponding to residues 219-233 of SEQ ID NO:450;
[0093] comprises (Gly4Ser)3 and the hinge sequence of nivolumab, corresponding to residues 212-223 of SEQ ID NO:451.

[0094] In other embodiments, a chimeric polypeptide or multimer comprises a linker that links a multimerization to an ECD; the linker GS linker that is (GGGGS)3; and the multimerization domain that is IgG Fc is the Fc of trastuzumab or the Fc of nivolumab. In other embodiments, a chimeric polypeptide or multimer comprises a linker; and the linker is a GS linker selected from among (GlySer)n, where n=1-10; (GlySer2); (Gly4Ser)n, where n=1-10; (Gly3Ser)n, where n=1-5; (SerGly4)n, where n=1-5; (GlySerSerGly)n, where n=1-5; GSGGSSGG; GSSSGSGSGSSG; GSSSGSGSGSSGG; GGSSGG; GGSSGGSGGSSSG; GSSSGSGSGGSSSGSGSG; GGSSGGSSGGGSSGGSSG; and GSSSGS; and a second linker is selected from among all or a portion of the hinge sequence of trastuzumab and all or a portion of the hinge sequence of nivolumab.

[0095] A chimeric polypeptide in the multimers can comprise a half-life extending moiety, such as, for example, the half-life extending moiety is an IgG Fc, a polyethylene glycol (PEG) molecule, or human serum albumin (HSA). The IgG Fc can be an IgG1 or IgG4 Fc, such as where the IgG1 Fc is the Fc of trastuzumab, set forth in SEQ ID NO:453; or the IgG4 Fc is the Fc of nivolumab, set forth in SEQ ID NO:455. The Fc can be the Fc of human IgG1, set forth in SEQ ID NO:452, and/or is the IgG4 Fc is the Fc of human IgG4, set forth in SEQ ID NO:454.

[0096] The pharmaceutical compositions can be formulated for any route of administration, such as in a sterile biologically compatible buffer, and also can be provided as a lyophilized powder. The pharmaceutical composition can be formulated for parenteral administration, or for formulated for systemic administration, such as s formulated for intravenous, intramuscular, or subcutaneous administration, for topical, oral, systemic, or local administration.

[0097] Also provided are mixtures of nucleic acid molecules encoding the homodimers and heterodimers provided herein. The nucleic acid molecules can comprise vectors encoding the chimeric polypeptides in the heterodimers and homodimers.

[0098] Also provided are stable cells lines and isolated cells that contain the nucleic acids or vectors and that, when cultured under appropriate conditions, produce the mixtures of the homomultimers and heteromultimers. The cell lines and cells are mammalian cells, such as, for example CHO cells. In some embodiments the cell lines and cells are isolated mammalian cells that encode the chimeric polypeptides in the composition that form the homomultimers and heteromultimers, where the isolated cell is not a zygote or fertilized egg, and optionally is not an embryonic stem cell or derived from an embryonic cell. In a jurisdiction where embryonic stem cells or cells that can develop into a human are not permitted, they are excluded from the scope of a cell line or isolated cell.

[0099] The cell line can be any suitable cell line, generally a mammalian cell line for producing eukaryotic proteins, such as a CHO cell or derivative. The stable cells lines reproducibly produce a substantially constant ratio of heteromultimers and homomultimers. For example, when the multimers are dimers, the ratio of one homomultimer to heteromultimer to the second homomultimers can be about 1:2:1, but generally, while reproducible for cell line and mixture, can vary, such as where the ratio of homodimer:heterodimer:homodimer is about 1-6:5-10:5-20 or about 1:6:9 or about 1:6:9-22 (see, e.g., Example 12). Because reproducible ratios of the component constructs are produced, they can be formulated for or used as pharmaceuticals; there is no need to purify the components for use separately or to then mix them.

[0100] Provided are methods for treating a disease, disorder, and condition, such as a cancer, an inflammatory disease, an angiogenic disease or a hyperproliferative disease, by administering a therapeutically effective amount of a pharmaceutical composition provided herein to a subject. The pharmaceutical compositions provided herein are for treatment or used for treating a disease, disorder, and condition that is, for example, cancer, an inflammatory disease, an angiogenic disease, or a hyperproliferative disease. Cancers include, for example, pancreatic, gastric, head and neck, cervical, lung, colorectal, endometrial, prostate, esophageal, ovarian, uterine, glioma, bladder, renal, or breast cancer. The disease, disorder, and condition can be a proliferative disease, such as, for example, a disease that involves proliferation and/or migration of smooth muscle cells, or is a disease of the anterior eye, or is a diabetic retinopathy, or psoriasis. The disease, disorder, and condition can be restenosis, ophthalmic disorders, stenosis, atherosclerosis, hypertension from thickening of blood vessels, bladder diseases, or obstructive airway diseases.

[0101] Combination therapies and regimens are provided. The methods and uses can comprise use of or administration of a pharmaceutical composition provided herein, and a second treatment that is a different anticancer agent or treatment, such as where the second treatment is an anti-cancer agent that is radiation therapy, immunotherapy, and/or a chemotherapeutic agent, such as for example, where the anti-cancer agent is a tyrosine kinase inhibitor or an antibody or an anti-checkpoint inhibitor, or other immunostimulatory agent, or where the anti-cancer agent is a quinazoline kinase inhibitor, an antisense or siRNA or other double-stranded RNA molecule, or an antibody that interacts with a HER receptor, an antibody conjugated to a radionuclide, or cytotoxin, or immunotoxin conjugate, or checkpoint inhibitor, or other immunostimulatory treatment.

[0102] Provided are methods and methods of use of the pharmaceutical compositions for treating cancer, an inflammatory disease, an angiogenic disease or a hyperproliferative disease, comprising administering a therapeutically effective amount of a pharmaceutical composition provided herein. The cancer can be pancreatic, gastric, head and neck, cervical, lung, colorectal, endometrial, prostate, esophageal, ovarian, uterine, glioma, bladder, renal or breast cancer. In other aspects, the disease is a proliferative disease. In other aspects, the proliferative disease involves proliferation and/or migration of smooth muscle cells, or is a disease of the anterior eye, or is a diabetic retinopathy, or psoriasis. In other aspects, the disease is restenosis, ophthalmic disorders, stenosis, atherosclerosis, hypertension from thickening of blood vessels, bladder diseases, and obstructive airway diseases.

[0103] In particular embodiments, provided are pharmaceutical compositions in which the chimeric polypeptide chains comprise an oECD from HER1 or an oECD from HER3, linked directly or indirectly to an Fc, and mixtures of the chains. The Fc can be linked via a hinge or portion thereof to the oECD. The Fc can include modifications to increase half-life of the resulting chains, heterodimers, homodimers, and mixtures thereof.

### BRIEF DESCRIPTION OF DRAWINGS

[0104] FIG. 1A depicts a schematic of the Human EGF Receptor 1 (HER1; ErbB1; EGFR) and sets forth the loci for various features with reference to HER1, but such structures also are conserved among other family members (i.e., HER2, 3, 4). The ECD of HER (ErbB) family members contains four subdomains, designated domains I (L1), II (S1), III (L2), and IV (S2). Subdomains I and III cooperate for ligand binding; domain II contains sequences required for dimerization (the ‘dimerization arm’); and domain IV contains sequences which allow domain II/IV tethering (except for HER2 which does not undergo a tethered conformation). The small disulfide-bonded modules within domains II and IV are represented by individual boxes. The β-hairpin/loop (also called the dimerization arm) in domain II (corresponding to amino acids 240-260 of full length mature HER1) is indicated. The shorter 0-hairpin/loops in domain IV that facilitate tethering (corresponding to amino acids 561-569 and to amino acids 572-585 of full length mature HER1) are indicated. Some amino acid residues within the loop regions that participate in dimerization and/or tethering of the receptor are specified. HER full-length receptors also contain a transmembrane domain (shaded region), juxtamembrane (JM) domain, kinase domain, and cytosolic tail (CT).

[0105] FIG. 1B depicts the mechanism of ligand induced HER dimerization. Domains I, II, III, and IV are depicted. Most (about 95%) of HER receptors exist in a tethered conformation where domains II and IV form an intramolecular interaction. The remaining 5% of monomeric receptors on the cell surface are in an untethered or open configuration. Ligands (E) bind to domains I and/or III of HER family receptors. Ligand binding stabilizes the untethered conformation in which the dimerization arm in domain II is exposed. The domain II dimerization arm interacts with regions in domain II of another HER family receptor to yield homo- and hetero-dimers. Ligand binding and dimerization of HER receptors induces activation of the intrinsic kinase domain, resulting in phosphorylation on specific tyrosine residues within the cytoplasmic tail and subsequent downstream signaling.

[0106] FIG. 2A depicts alignment and domain organization of HER1 (EGFR) ECD isoforms as compared to the mature form (lacking the signal sequence) of the full-length EGFR (NP_005219, corresponding to amino acids 25-1210 of SEQ ID NO:2). Aligned HER1 (EGFR) ECD isoforms (lacking a signal sequence) include HF100 (SEQ ID NO:12), HF110 (SEQ ID NO: 10), HF120 (ERRP, SEQ ID NO:34), HER1 (EGFR) isoform b (NP_958439, corresponding to amino acids 25-628 of SEQ ID NO:12), HER1 (EGFR) isoform c (NP_958440, corresponding to amino acids 25-405 of SEQ ID NO:133), and HER1 (EGFR) isoform d (NP_958441, corresponding to amino acids 25-705 of SEQ ID NO:131). Domain I (corresponding to amino acids 1-165 of full-length mature HER1 (EGFR)) and domain III (corresponding to amino acids 313-481 of full-length mature HER1 (EGFR)) are denoted in bold. Domain II (corresponding to amino acids 166-312 of full-length mature HER1 (EGFR)) and domain IV (corresponding to amino acids 482-621 of full-length mature HER1 (EGFR)) are denoted in regular font, with cysteine modules highlighted. Non-ECD portions of full-length mature HER1 (EGFR)) are denoted. Amino acids showing no alignment to amino acid sequences in the mature full-length HER1 (EGFR) are depicted by italics.

[0107] FIG. 2B depicts alignment and domain organization of HER2 ECD isoforms as compared to the mature form (lacking the signal sequence) of the full-length HER2 (AAA75493.1, corresponding to amino acids 23-1255 of SEQ ID NO:4). Aligned HER2 ECD isoforms (lacking a signal sequence) include F11200 (SEQ ID NO:18), ErbB2.1e (corresponding to amino acids 23-633 of SEQ ID NO:137), HF210 (SEQ ID NO:16), HF220 (SEQ ID NO:14), ErbB2.1d (corresponding to amino acids 25-680 of SEQ ID NO:136), ErbB2.1f (corresponding to amino acids 23-575 of SEQ ID NO:138), HER2-int11 (corresponding to amino acids 23-438 of SEQ ID NO:141), herstatin (AAD56009, corresponding to amino acids 23-419 of SEQ ID NO:135, an alternatively spliced variant of HER2), and ErbB2.a (corresponding to amino acids 23-90 of SEQ ID NO:139). Domain I (corresponding to amino acids 1-172 of full-length mature HER2) and domain III (corresponding to amino acids 320-488 of full-length mature HER2) are denoted in bold. Domain II (corresponding to amino acids 173-319 of mature full-length HER2) and domain IV (corresponding to amino acids 489-628 of full-length mature HER2) are denoted in regular font, with cysteine modules highlighted. Non-ECD portions of full-length mature HER1 (EGFR) are identified. Amino acids showing no alignment to amino acid sequences in the mature full-length HER2 are depicted by italics.

[0108] FIG. 2C depicts alignment and domain organization of HER3 ECD isoforms as compared to the mature form (lacking the signal sequence) of the full-length HER3 (NP_001973.1, corresponding to amino acids 20-1342 of SEQ ID NO:6). Aligned HER3 ECD isoforms (lacking a signal sequence) include HF300 (SEQ ID NO:26), HF310 (SEQ ID NO:20), p85HER3 (corresponding to amino acids 20-562 of SEQ ID NO:22), HER3-519 (SEQ ID NO:24), HER3 isoform (AAH02706, corresponding to amino acids 20-331 of SEQ ID NO:143), HER3-int10 (corresponding to amino acids 20-403 of SEQ ID NO:146), p75sHER3 (corresponding to amino acids 20-534 of SEQ ID NO:150), HER3-int11 (corresponding to amino acids 20-425 of SEQ ID NO:148), p45sHER3 (corresponding to amino acids 20-331 of SEQ ID NO:149), p50sHER3 (corresponding to amino acids 20-400 of SEQ ID NO:151), and HER3 isoform 2 (P21860-2, corresponding to amino acids 20-183 of SEQ ID NO:144). Domain I (corresponding to amino acids 1-159 of full-length mature HER3) and domain III (corresponding to amino acids 312-480 of full-length mature HER3) are denoted in bold. Domain II (corresponding to amino acids 160-311 of full-length mature HER3) and domain IV (corresponding to amino acids 481-621 of full-length mature HER3) are denoted in regular font, with cysteine modules highlighted. Non-ECD portions of full-length mature HER3 are noted. Amino acids showing no alignment to amino acid sequences in the mature full-length HER3 are depicted by italics.

[0109] FIG. 2D depicts alignment and domain organization of HER4 (ErbB4) ECD isoforms as compared to the mature form (lacking the signal sequence) of the full-length HER4 (ErbB4) (NP_005226, corresponding to amino acids 26-1308 of SEQ ID NO:8). Aligned ErbB4 ECD isoforms (lacking a signal sequence) include ErbB4-522 (SEQ ID NO:30), H1F400 (SEQ ID NO: 32), ErbB4-int11 (corresponding to amino acids 26-430 of SEQ ID NO: 157), ErbB4-int12 (corresponding to amino acids 26-506 of SEQ ID NO:159), H1F410 (SEQ ID NO:28), ErbB4-int9 (corresponding to amino acids 26-391 of SEQ ID NO:153), and ErbB4-int10 (corresponding to amino acids 26-421 of SEQ ID NO:155). Domain I (corresponding to amino acids 1-163 of full-length mature ErbB4) and domain III (corresponding to amino acids 309-477 of full-length mature ErbB4) are denoted in bold. Domain II (corresponding to amino acids 164-308 of full-length mature ErbB4) and domain IV (corresponding to amino acids 478-625 of full-length mature ErbB4) are denoted in regular font, with cysteine modules highlighted. Non-ECD portions of full-length mature HER1 (EGFR) are noted. Amino acids showing no alignment to amino acid sequences in the mature full-length ErbB4 are depicted by italics.

[0110] FIG. 3 depicts the interaction of Oligo Trap Fusion Proteins (OFPs) that optionally contain chimeric fused ECDs in each monomer, and the interaction of a resulting product with ligands and receptors. The OFPs can be purified as a single species, or as described herein, as a mixture of the resulting products. The ECDs generally are modified for optimal interaction with the cognate receptor.

[0111] FIG. 4 depicts preparation of oligobodies (oligo-traps) in mammalian cells and the resulting product mixture of an exemplary mixture (see, also Example 12).

[0112] FIG. 5 shows that the ratios of oligobody product mixtures produced in established CHO cell lines (oligoclonal cells) expressing the monomers in RB-242 as an oligoclonal antibody preparation from each cell line. The results, analyzed by size exclusion HPLC (SE-HPLC), showing the ratios of products produced (i.e., 6:35:59 for clone 1B12), and showing that that the ratios among the components are reproducible from the independently derived cell lines (CHO cells), where:
[0113] 320 is the ECD optimized HER3 homodimer;
[0114] 242 is the ECD optimized heterodimer (HER1/HER3); and
[0115] 140 is the ECD optimized EGFR (HER1) homodimer.

[0116] FIG. 6 shows the inhibition of cell proliferation by the mixture (oligobody mixture) using a product of a cell line of FIG. 5. The results show that the mixture is more effective in inhibiting cell proliferation than single component therapeutics.

[0117] FIG. 7 shows eleven growth factors that initiate signaling in the four members of the EGFR family.

[0118] FIG. 8 shows a comparison of the Oligo-trap (mixture of optimized EGFR and HER3 homodimer: Fc IgG fusion proteins plus the optimized heterodimer) for its ability to inhibit tumor cell growth compared to the optimized heterodimer alone.

[0119] FIGS. 9A and 9B show alignments of domain DII and domain DIV among the HER family receptors.

[0120] FIG. 10 depicts growth factor cross-signaling in the EGFR family (reproduced from Harskamp et al., (2016) Nature Rev. Nephrology 12:496-506); eleven ligand/growth factor families activate the HER Family (Amphiregulin (AREG), Epiregulin (EREG), Epigen (EPGN), heparin binding EGF (HB-EGF), Betacellulin (BTC), and NRG neuregulin). Of these, EGF, TGF-alpha, AREG, EPGN are specific for the EGFR, while HB-EGF, EREG, and BTC activate EGFR and HER4; NRG-1, 2 activate HER3 and NRG-3,4 activate HER4. HER4 is distinct from the other receptors in that it has roles in cardiomyocyte survival, neuronal maintenance, and has been characterized as an oncogene and a tumor suppressor gene. For anti-tumor treatment HER4 is not a target.

[0121] FIG. 11 depicts the structure of a back-to-back heterodimer between the optimized EGFR ECD and optimized HER3 ECD. These structural features are present in all members of the EGFR family and allow homodimerization and heterodimerization. L1=Domain 1, CR1=Domain 2, L2=Domain 3. Exemplary EGFR mutations T15S and G564S, and HER3 mutation Y246A are shown. These result in an open configuration, which occurs when these mutations or others that can be selected for this configuration are present.

[0122] FIGS. 12A and 12B depict the change in conformation of the EGFR before and after binding EGF (or one of its other ligands). While the ligand induces conformational change in the receptor, it is receptor:receptor interactions that mediate dimerization and then multimerization. FIG. 12A shows the binding and conformational change in an EGFR upon ligand binding; FIG. 12B shows the multimerization of the of the receptors on the cell surface upon ligand binding. As described and shown herein, the heterodimer/homodimer mixtures with modified ECDs can mimic the multimerization, thereby effectively binding ligand.

[0123] FIGS. 13A-C each of A-C depicts the mechanism of action of the heterodimer/homodimer mixtures provided herein that result in increased avidity for ligand, thereby inhibiting receptors or receptor induced processes to thereby inhibit tumor growth.

[0124] FIG. 14 shows the results of treatment with the compositions provided herein in an animal model of antigen-induced arthritis. Animals (6 per group) were treated with the mixture (designated EN-2642) alone by injection into the tail veins with 100 ug, 300 ug and 1 mg EN-2642 per mouse starting at Day 0. A statistical difference was observed in knee swelling at Day 1 and Day 2 following treatment with EN-2642 vs. control (phosphate buffered saline).

[0125] FIG. 15 shows that including mutations in the Fe increases half-life of the mixtures of homodimers and heterodimers and other structures that form. Groups 2, 3, and 4 exposed to the administered mixtures are increased by 200-300% compared to Groups 1 and 5, which were administered mixtures that do not include the Fc mutations.

[0126] FIG. 16 depicts binding of IgG1Fc to protein A is ablated by the H435R-Y436F mutations.

[0127] FIG. 17 shows that the EGFR/Fc:HER3/Fc DNA co-transfection ratio facilities the heterodimer separation.

[0128] FIG. 18 shows that co-expressed mixtures of homodimer and heterodimer can be separated on cation exchange (CEX)-chromatographs; purified EGFR/Fc and HER3/Fc homodimers were used as column chromatograph retention time (RT) markers.

[0129] FIG. 19 shows that separation of heterodimer from HER3 homodimer is increased using PrismA resin.

[0130] FIGS. 20A-20H show the process for isolating heterodimers from homodimers. FIG. 20A outlines the protocol for step 1 in which the mixtures are separated by Protein A resin chromatography; FIGS. 20B-20E show elution profiles; and FIG. 20F shows step 2 separation of the HER3 heterodimers from the HER3 homodimers by cation exchange (CEX) chromatography FIGS. 20G-20H show the results of the final polishing step which allows for purification of 150 mg of the heterodimers at ˜99% purity (FIG. 20H), among which 92.7% was the monomer (FIG. 20G).

[0131] FIGS. 21A-J depict an alternative separation protocol, employing CEX chromatography and runtime markers, that does not require mutation of the Fc.

[0132] FIGS. 22A and 22B respectively depict first- and second-generation growth factor traps that deplete excess growth factors. FIG. 22A depicts EN-2200, the first-generation prior art trap that contains a fusion of the EGFR and HER3 extracellular domains with the hinge region of trastuzumab. FIG. 22B depicts second-generation constructs that include affinity-optimized ECDs, and Fc components that were engineered for serum half-life extension. The second-generation traps include EN-2140, an EGFR homodimer, EN-2320, a HER3 homodimer, EN-2242 and EGFR:HER3 heterodimer, and EN-2642 a co-expressed mixture of EGFR and HER3 homodimers and heterodimers.

[0133] FIG. 23 depicts the assay protocol used to assess the inhibitory activity of the various growth factor trap constructs for inhibiting growth factor-induced proliferation in cell culture.

[0134] FIGS. 24A-D provide a series of bar graphs that quantify cell proliferation in culture using various cancer cell lines and various treatments including an EGFR inhibitor and the growth-factor trap constructs (mixtures of homodimers and heterodimers, heterodimers provided herein). FIG. 24A depicts quantified growth factor-induced cell proliferation of CAL-12T cells in units of luminescence. Cell proliferation is quantified for each of the following treatments: Untreated, NRG1β only, NRG1(3+cetuximab, NRG1(3+EN2642, NRG1j3+EN2140; and Untreated, EGF only, EGF+cetuximab, EGF+EN2320, EGF+EN2642, EGF+EN2140. FIG. 24B depicts quantified growth factor-induced cell proliferation of OE33 cells in units of luminescence. Cell proliferation is quantified for the same treatments described in FIG. 24A. FIG. 24C depicts quantified growth factor-induced cell proliferation of NCl-H820 cells in units of luminescence. Cell proliferation is quantified for the same treatments described in FIG. 24A. FIG. 24D depicts quantified growth factor-induced cell proliferation of HCC95 cells in units of luminescence. Cell proliferation is quantified for each of the following treatments: Untreated, NRG1β only NRG1β+cetuximab, NRG1β+EN2642, NRG1β+EN2140.

### DETAILED DESCRIPTION

### Outline

[0135] A. Definitions
[0136] B. Overview: Pan-Cell Surface Receptor-Specific Therapeutics and Compositions Comprising Mixtures of Species Thereof and Problems with Prior Pan-Cell Surface Receptor Therapeutics and Solutions Provided Herein
   [0137] 1. Pan-Cell Surface Receptor Specific Therapeutics
   [0138] 2. Problems with Prior Pan-Cell Surface Receptor Therapeutics and Solution Provided
      [0139] a. Mechanism of Action of the Hermodulins that Contain a Modified ECD of an EGFR Family Member, such as HER1 (EGFR1) or HER3, Linked to a Multimerization Domain, Such as an Fc, or a Modified Fc
      [0140] b. Problems with Prior Pan-Cell Surface Receptor Therapeutics and Solutions Provided Herein
[0141] C. HER Receptor and Other Cell Surface Receptor Structures and Activities
   [0142] 1. HER1 ECD structure and domain organization
   [0143] 2. HER2 ECD structure and domain organization
   [0144] 3. HER3 ECD structure and domain organization
   [0145] 4. HER4 ECD structure and domain organization
   [0146] 5. HER Family Ligands, Ligand specificity, and Ligand-Mediated Receptor activation
   [0147] 6. Dimerization versus Tethering and Generation of Active Homo- and Heterodimers
   [0148] 7. HER Family Receptor Activity
      [0149] a. Cell Proliferation
      [0150] b. Cell Survival
      [0151] c. Angiogenesis
      [0152] d. Migration and Invasion
   [0153] 8. Other CSR ECDs
      [0154] a. VEGFR1 (Flt-1) and VEGFR2 (KDR)
      [0155] b. FGFR1-FGFR4
      [0156] c. IGF-1R
      [0157] d. RAGE and other CSRs
[0158] D. Components of ECD multimers and the Formation of ECD multimers
   [0159] 1. ECD polypeptides
      [0160] a. HER family full length ECD
         [0161] i. HER1 ECD
         [0162] ii. HER2 ECD
         [0163] iii. HER3 ECD
         [0164] iv. HER4 ECD
      [0165] b. HER family truncated ECD
         [0166] i. Truncated HER1 ECD
         [0167] ii. Truncated HER2 ECD
         [0168] iii. Truncated HER3 ECD
         [0169] iv. Truncated HER4 ECD
      [0170] c. Hybrid ECD
      [0171] d. Other CSR and RTK ECDs, or portions thereof
      [0172] e. Fusions to increase half-life
      [0173] f. Other ECD Polypeptides and Alternatively Spliced Polypeptide Isoforms
   [0174] 2. Formation of ECD Multimers
      [0175] a. Peptide Linkers
      [0176] b. Heterobifunctional linking agents
      [0177] c. Polypeptide Multimerization domains
      [0178] d. Multimerization Domains, Immunoglobulin Domain
         [0179] i. Fc domain
         [0180] ii. Leucine Zipper
         (a) Fos and Jun
         (b) GCN4
         [0181] iii. Other multimerization domains
         (a) R/PKA-AD/AKAP
   [0182] 3. Chimeric ECD Polypeptides
   [0183] Exemplary Chimeric HER ECD polypeptides
[0184] E. ECD multimers
   [0185] 1. Full-length HER1 ECD and all or part of an ECD of another CSR
   [0186] 2. Two or more truncated ECD components
   [0187] 3. Hybrid ECD multimers
   [0188] 4. ECD components that are the same or derived from the same CSR
[0189] F. Growth Factor Traps (Pan Growth Factor Trap) Constructs with modifications in the multimerization domain and/or the ECD, and with optional Linker
   [0190] 1. Receptor Tyrosine Kinases (RTKs)
      [0191] a. Human Epidermal Growth Factor Receptor (HER) Family
      [0192] b. Diseases Associated with the Human Epidermal Growth Factor Receptor (HER) Family and their Ligands
      [0193] c. Mutations to increase affinity for ligands
   [0194] 2. Pan-Growth Factor Inhibition
      [0195] a. RB200 and RB242 Ligand Traps
      [0196] b. RB200 and RB242 for the Treatment of Autoimmune Disease
      [0197] c. RB242 Ligand Trap
   [0198] 3. Optimized Multi-Specific, such as Bi-Specific, Growth Factor Trap Constructs
      [0199] a. The Extracellular Domain (ECD) Polypeptides
      [0200] b. Modifications to the Extracellular Domains
      [0201] c. The Multimerization Domain and Linkers
      [0202] d. Modifications to the Fc Domains
         [0203] i. Modifications that Enhance Neonatal Fc Receptor (FcRn) Recycling
         [0204] ii. Modifications that alter Effector Functions
      [0205] e. Enhancement of or Reduction/Elimination of Fc Immune Effector Functions
         [0206] i. Other Modifications of Fc portions
[0207] G. Compositions and cells/cell lines containing Oligoclonal antibodies (Growth Factor Trap Mixtures), Therapeutic Uses and Methods of Treatment
   [0208] 1. Pharmaceutical Compositions
   [0209] 2. Therapeutic Uses and Methods of Treatment
[0210] H. Methods of Producing Nucleic Acid Encoding Chimeric ECD polypeptide fusions and Production of the Resulting ECD Multimers
   [0211] 1. Synthetic genes and polypeptides
   [0212] 2. Methods of cloning and isolating ECD polypeptides
   [0213] 3. Methods of Generating and Cloning ECD Polypeptide Chimeras
   [0214] 4. Expression Systems
      [0215] a. Prokaryotic expression
      [0216] b. Yeast
      [0217] c. Insect cells
      [0218] d. Mammalian cells
      [0219] e. Plants
   [0220] 5. Methods of Transfection and Transformation
   [0221] 6. Recovery and Purification of ECD Polypeptides, Chimeric Polypeptides, and the Resulting ECD multimers
[0222] I. Assays to Assess or Monitor ECD Multimer Activities
   [0223] 1. Kinase/Phosphorylation Assays
   [0224] 2. Complexation/Dimerization
   [0225] 3. Ligand Binding
   [0226] 4. Cell Proliferation Assays
   [0227] 5. Cell Disease Model Assays
   [0228] 6. Animal Models
[0229] J. Preparation, Formulation and Administration of ECD multimers and ECD multimer Compositions
[0230] K. Exemplary Methods of Treatment with ECD Multimers Mixtures
   [0231] 1. HER-mediated Diseases or Disorders
      [0232] a. Cancer
      [0233] b. Angiogenesis
      [0234] c. Neuregulin-associated disease
      [0235] d. Smooth Muscle Proliferative-related diseases and conditions
   [0236] 2. RTK-mediated diseases or disorders
      [0237] a. Angiogenesis-related ocular conditions
      [0238] b. Angiogenesis-related atherosclerosis
      [0239] c. Additional Angiogenesis-related Treatments
      [0240] d. Cancers
   [0241] 3. Other CSR-mediated Diseases or Disorders
   [0242] 4. Selection of the ECD Polypeptide Components of an ECD multimer
   [0243] 5. Patient/Subject Selection
   [0244] 6. Combination Therapies
[0245] L. Methods for Identifying, Screening, and creating Pan-HER Therapeutics
   [0246] 1. Targets for Pan-HER Therapeutics
   [0247] 2. Screening methods to Identify Pan-HER Therapeutics
      [0248] a. Phage Display
         [0249] i. Peptide Libraries
         [0250] ii. Multimeric Polypeptides (Heterodimeric peptides)
      [0251] b. Computer Aided Optimization
      [0252] c. Exemplary Screening Assays
[0253] M. Examples

### A. DEFINITIONS

[0254] Unless defined otherwise, all technical and scientific terms used herein have the same meaning as is commonly understood by one of skill in the art to which the invention(s) belong. All patents, patent applications, published applications and publications, GENBANK sequences, websites and other published materials referred to throughout the entire disclosure herein, unless noted otherwise, are incorporated by reference in their entirety. In the event that there is a plurality of definitions for terms herein, those in this section prevail. Where reference is made to a URL or other such identifier or address, it is understood that such identifiers can change and particular information on the internet can come and go, but equivalent information is known and can be readily accessed, such as by searching the internet and/or appropriate databases. Reference thereto evidences the availability and public dissemination of such information.

[0255] Since interactions are dynamic, amino acid positions noted are for reference and exemplification. The noted positions reflect a range of loci that vary by 2, 3, 4, 5 or more amino acids, but can be identified, for example, by alignments. Variations also exist among allelic variants and species variants. Those of skill in the art can identify corresponding sequences by visual comparison or other comparisons including readily available algorithms and software.

[0256] As used herein, “pan-growth factor trap construct,” “pan-EGFR ligand trap construct,” “growth factor trap,” “multi-specific growth factor trap construct,” “bi-specific growth factor trap construct,” “EGFR ligand trap construct,” “pan-HER ligand trap construct,” “pan-HER therapeutic,” “EGFR ligand trap construct,” “HER ligand trap construct” and “growth factor trap construct” are used interchangeably to refer to pan-cell surface receptor molecules, including peptide-based compounds, that modulate the activity of two or more cell surface receptors, generally including at least one of a human epidermal growth factor receptor (EGFR), also referred to as a HER or ErbB receptor. Generally, a pan-growth factor trap targets at least two different receptors, generally HER receptors, such as via ligand binding and/or interaction with the receptors. In general, these constructs can modulate the activity of two or more cell surface receptors. The compositions provided herein can comprise one or more of these constructs among the components of the mixtures in the compositions.

[0257] As used herein, “pan-HER therapeutics” or “pan-HER-specific therapeutics” or “GFTs” are pan-cell surface receptor therapeutics (molecules, including peptide-based compounds and small molecules), that can modulate the activity of two or more HER (ErbB) receptors. A pan-HER therapeutic targets at least two different HER receptors, such as via ligand binding and/or interaction with the receptors.

[0258] As used herein, “hermodulins” (also called “neumodulins”) refer to polypeptide constructs that are ligand traps that each capture or bind two or more growth factors that activate the EGFR family of receptors. Oligo-trap polypeptides described herein are among the hermodulins. They include the pan-HER therapeutics.

[0259] As used herein, unless noted otherwise, amino acid residue numbering for ECDs and receptors numbering, is with respect to the ECD or receptor without a signal sequence, and for Fc's is EU numbering (see Tables 3-4).

[0260] As used herein, an anti-cancer agent includes any cancer treatment and drug therefor and includes, for example, radiation therapy, surgery, anti-cancer compounds, including small molecules, chemotherapeutic agents, such as cisplatin and gemcitabine, immunotherapeutics, and monoclonal antibodies.

[0261] As used herein, oligoclonal multimers, such as oligoclonal antibodies, refer to compositions that contain mixtures of species of multimeric therapeutics, such as bi-specific therapeutics, such as bi-specific antibodies and derivatives or modified forms thereof, that are formed from at least two different monomers. The monomers, when combined form a variety of species that include homomultimers, and heteromultimers.

[0262] The oligoclonal multimers refer to the mixture of the multimers that result from combining the monomers. The oligoclonal multimers are the therapeutic and can be provided in pharmaceutical compositions that contain the oligomultimers in a therapeutically effective suitable vehicle or carrier.

[0263] As used herein, an oligobody preparation is the mixture of heteromultimers and homomultimers in preparations described herein, such as the mixtures of heteromultimers and homomultimers in a growth factor trap (GFT; oligo-trap) preparation, including those with chimeric ECDs and those in which the ECDs contain mutations that increase affinity for the cognate receptor. The oligo-trap, which is mixtures of products that result upon expression of nucleic acid encoding the monomers in mammalian cells lines, such as CHO cell lines. An example of an oligobody (oligo-trap) preparation in CHO cells, is provided in FIG. 4.

[0264] As used herein, and oligo-fusion protein (OFP) is an oligobody (oligo-trap) preparation in which the ECD portions are fusions of the two to four different ECDs to produce chimeric ECDs. An example of an OFP and interaction of an OFP with ligands and receptors is provided in FIG. 3. A single species of the OFP mixture containing at least one chimeric ECD portion can be purified and used as the therapeutic.

[0265] As used herein, an oligoclonal cell refers to the mammalian cell that encodes the oligobody mixtures.

[0266] As used herein, a cell surface receptor is a protein that is expressed on the surface of a cell and typically includes a transmembrane domain or other moiety that anchors it to the surface of a cell. As a receptor it binds to ligands that mediate or participate in an activity of the cell surface receptor, such as signal transduction or ligand internalization. Cell surface receptors include, but are not limited to, single transmembrane receptors and G-protein coupled receptors. Receptor tyrosine kinases, such as growth factor receptors, also are among such cell surface receptors.

[0267] As used herein, a domain refers to a portion (a sequence of three or more, generally 5 or 7 or more amino acids) of a polypeptide that is a structurally and/or functionally distinguishable or definable. For example, a domain includes those that can form an independently folded structure within a protein made up of one or more structural motifs (e.g., combinations of alpha helices and/or beta strands connected by loop regions) and/or that is recognized by virtue of a functional activity, such as kinase activity. A protein can have one, or more than one, distinct domain. For example, a domain can be identified, defined, or distinguished by homology of the sequence therein to related family members, such as homology and motifs that define an extracellular domain. In another example, a domain can be distinguished by its function, such as by enzymatic activity, e.g., kinase activity, or an ability to interact with a biomolecule, such as DNA binding, ligand binding, and dimerization. A domain independently can exhibit a function or activity such that the domain independently or fused to another molecule can perform an activity, such as, for example proteolytic activity or ligand binding. A domain can be a linear sequence of amino acids or a non-linear sequence of amino acids from the polypeptide. Many polypeptides contain a plurality of domains. For example, the domain structure of HER1 (EGFR) is set forth in FIG. 1A: it includes an ECD, a transmembrane domain, a juxtamembrane domain, a kinase domain, and a C-terminal cytoplasmic domain. For HER1 (EGFR) the ECD includes four subdomains referred to as I (or L1), II (or S1), III (or L2) and IV (or S2). The “L” subdomains (I and III) participate in ligand interactions, the II (S1) and IV (S2) domains interact via the tethering region; subdomain II (S1) includes the dimerization loop. Those of skill in the art are familiar with domains and can identify them by virtue of structural and/or functional homology with other such domains.

[0268] As used herein, a cytoplasmic domain is a domain that participates in signal transduction.

[0269] As used herein, an extracellular domain (ECD) is the portion of the cell surface receptor that occurs on the surface of the receptor and includes the ligand binding site(s). For purposes herein, reference to an ECD includes any ECD-containing molecule, or portion thereof, so long as the ECD polypeptide does not contain any contiguous sequence associated with another domain (i.e., Transmembrane, protein kinase domain, or others) of a cognate receptor. Thus, for example, an ECD polypeptide includes alternative spliced isoforms of CSRs where the isoform has an ECD-containing portion, but lacks any other domains of a cognate CSR, and also has additional sequences not associated or aligned with another domain sequence of a cognate CSR. These additional sequences can be intron-encoded sequences such as occur in intron fusion protein isoforms. Typically, the additional sequences do not inhibit or interfere with the ligand binding and/or receptor dimerization activities of a CSR ECD polypeptide. An ECD polypeptide also includes hybrid ECDs.

[0270] As used herein, a hybrid ECD refers to an ECD that contains a portion of an ECD from different cell surface receptors. Typically, a hybrid ECD contains at least two ECD subdomains from different cell surface receptors.

[0271] As used herein, a chimeric polypeptide refers to a polypeptide that contains portions from at least two different polypeptides or from two non-contiguous portions of a single polypeptide. Thus, a chimeric polypeptide generally includes a sequence of amino acid residues from all or part of one polypeptide and a sequence of amino acids from all or part of another different polypeptide. The two portions can be linked directly or indirectly and can be linked via peptide bonds, other covalent bonds, or other non-covalent interactions of sufficient strength to maintain the integrity of a substantial portion of the chimeric polypeptide under equilibrium conditions and physiologic conditions, such as in isotonic pH 7 buffered saline. For purposes herein, chimeric polypeptides include those containing all or part of an ECD portion of a CSR linked directly or indirectly to a multimerization domain. Chimeric polypeptides can include additional sequences as well, such as for example, epitope tags.

[0272] As used herein, a fusion construct refers to a nucleic acid molecule containing coding sequence from one nucleic acid molecule and the coding sequence from another nucleic acid molecule in which the coding sequences are in the same reading frame such that when the fusion construct is transcribed and translated in a host cell, the protein is produced containing the two proteins. The two molecules can be adjacent in the construct or separated by a linker polypeptide that contains, 1, 2, 3, or more, and typically fewer than 10, 9, 8, 7, 6 amino acids. The protein product encoded by a fusion construct is referred to as a fusion polypeptide. The spacer can encode a polypeptide that alters the properties of the polypeptide, such as solubility or intracellular trafficking.

[0273] As used herein, a fusion protein refers to a chimeric protein containing two or portions from two more proteins or peptides that are linked directly or indirectly via peptide bonds.

[0274] As used herein, an Intron Fusion Protein (IFP) refers to an isoform that lacks one or more domain(s) or portion of one or more domain(s) resulting in an alteration of a biological activity of a receptor. An IFP contains one or more amino acids not encoded by an exon, operatively linked to exon-encoded amino acids and/or is shortened compared to a wildtype or predominant form encoded by a cell surface receptor (CSR) gene. An IFP can be encoded by an alternatively spliced RNA and/or RNA molecules identified in silico by identifying potential splice sites and then producing such molecules by recombinant methods. Typically, an IFP is shortened by the presence of one or more stop codons in an IFP-encoding RNA that are not present in the corresponding sequence of an RNA encoding a wildtype or predominant form of a CSR polypeptide. Addition of amino acids and/or a stop codon can result in an IFP that differs in size and sequence from a wildtype or predominant form of a polypeptide.

[0275] IFPs can include natural and combinatorial intron fusion proteins. A natural IFP refers to a polypeptide that is encoded by an alternatively spliced RNA that contains one or more amino acids encoded by an intron operatively linked to one or more portions of the polypeptide encoded by one or more exons of a gene.

[0276] Alternatively spliced mRNA is one that is isolated or is one that can be prepared synthetically by joining splice donor and acceptor sites in a gene. A natural IFP contains one or more amino acids and/or one or more stop codons encoded by an intron sequence. A combinatorial IFP refers to a polypeptide that is shortened compared to a wildtype or predominant form of a polypeptide. Typically, shortening removes one or more domains or a portion thereof from a polypeptide such that a biological activity is altered. Combinatorial IFPs often mimic a natural IFP in that one or more domains or a portion thereof that is/are deleted in a natural IFP are derived from the same gene sequence or are derived from a gene sequence in a related gene family.

[0277] As used herein, a multimerization domain refers to a sequence of amino acids that promotes stable interaction of a polypeptide molecule with another polypeptide molecule containing a complementary multimerization domain, which can be the same or a different multimerization domain to forms a stable multimer with the first domains. Generally, a polypeptide is joined directly or indirectly to the multimerization domain. Exemplary multimerization domains include the immunoglobulin sequences or portions thereof, leucine zippers, hydrophobic regions, hydrophilic regions, compatible protein-protein interaction domains such as, but not limited to an R subunit of PKA and an anchoring domain (AD), and a free thiol that forms an intermolecular disulfide bond between two molecules that form stable multimers. The multimerization domain, for example, can be an immunoglobulin constant region. The immunoglobulin sequence can be an immunoglobulin constant domain, such as the Fc domain or portions thereof from IgG1, IgG2, IgG3 or IgG4 subtypes, IgA, IgE, IgD and IgM.

[0278] As used herein, “knobs into holes” (also referred to herein as protuberance-into-cavity) refers to particular multimerization domains engineered such that steric interactions between and/or among such domains, not only promote stable interaction, but also promote the formation of heterodimers (or multimers) over homodimers (or homomultimers) from a mixture of monomers. This can be achieved, for example by constructing protuberances and cavities. Protuberances can be constructed by replacing small amino acid side chains from the interface of the first polypeptide with larger side chains (e.g., tyrosine or tryptophan). Compensatory “cavities” of identical or similar size to the protuberances optionally are created on the interface of a second polypeptide by replacing large amino acid side chains with smaller ones (e.g., alanine or threonine).

[0279] As used herein, complementary multimerization domains refer to two or more multimerization domains that interact to form a stable multimers of polypeptides linked to each such domain. Complementary multimerization domains can be the same domain or a member of a family of domains, such as for example, Fc regions, and leucine zippers.

[0280] As used herein, the polypeptides that contain at least two chimeric polypeptides that include an ECD portion and a multimerization domain, also are referred to as “ECD multimers” (also termed homo- or heteromultimer or homo- or heterodimer.) In instances in which the multimerization domain is from an antibody or portion thereof, the polypeptides can be referred to as immunoadhesins or receptabody (receptor body) dimers or multimers. The constituent polypeptides of the multimers also are referred to herein as chimeric polypeptides. Linkage of a multimerization domain to an ECD can be direct or indirect and can be effected using recombinant nucleic acid methods to produce fusion proteins. Linkage also can be effected using chemical coupling methods, such as using heterobifunctional reagents. Exemplary coupling agents include N-succinimidyl-3-(2-pyridyldithiol) propionate (SPDP), iminothiolane (IT), bifunctional derivatives of imidoesters (such as dimethyl adipimidate HCL), active esters (such as disuccinimidyl suberate), aldehydes (such as glutaraldehyde), bis-azido compounds (such as bis(p-azidobenzoyl)hexanediamine), bis-diazonium derivatives (such as bis-(p-diazoniumbenzoyl)-ethylenediamine), diisocyanates (such as toluene 2,6-diisocyanate), and bis-active fluorine compounds (such as 1,5-difluoro-2, 4-dinitrobenzene).

[0281] As used herein, an antibody refers to an immunoglobulin molecule that has a specific amino acid sequence that recognizes a specific antigen unique to its target. Immunoglobulins are glycoproteins that structurally appear as a “Y”-shaped molecule containing two identical heavy chains (from any of the five classes of heavy chains: γ, δ, α, μ, ε) and two identical light chains connected by disulfide bonds. Each heavy chain has a constant region, which is the same for all immunoglobulins of the same class (C_{H}), and a variable region (V_{H}), which serves as the antigen binding site and differs between immunoglobulins depending on the antigen specificity. Heavy chains γ, δ, α have a constant region composed of three domains (C_{H1}, C_{H2}, and C_{H3}) and have a hinge region, while the constant region of heavy chains μ, ε are composed of four domains (C_{H1}, C_{H2}, and C_{H3}, C_{H4}). The light chain has one constant (C_{L}) and one variable (V_{L}) domain. For purposes herein, reference to an antibody refers to a molecule containing all or part of an immunoglobulin molecule containing one or more domains thereof. For example, a Fab fragment is part of an antibody molecule composed of one constant and one variable domain of each of the heavy and light chains. The Fc fragment is composed of two to three constant domains, and optionally all or part of the hinge region (depending on the class of antibody) of the heavy chain. Thus, reference to an antibody refers to polyclonal antibodies, monoclonal antibodies, or any molecule containing part of an antibody portion, such as for example, a receptabody dimer or multimer where the multimerization domain linking two polypeptides (i.e., the ECD, or portion thereof, of at least two CSRs) together is an antibody, or portion thereof, such as an Fc fragment.

[0282] As used herein, a monoclonal antibody refers to a highly specific antibody produced in the laboratory by clones of a single hybrid cell by the fusion of a B cell with a tumor cell.

[0283] As used herein, conjugate refers to the joining, pairing, or association of two or more molecules. For example, two or more polypeptides (or fragments, domains, or active portions thereof) that are the same or different can be joined together, or a polypeptide (or fragment, domain, or active portion thereof) can be joined with a synthetic or chemical molecule or other moiety. The association of two or more molecules can be through direct linkage, such as by joining of the nucleic acid sequence encoding one polypeptide with the nucleic acid sequence encoding another polypeptide, or can be indirect such us by noncovalent or covalent coupling of one molecule with another. For example, conjugation of two or more molecules or polypeptides can be achieved by chemical linkage.

[0284] As used herein, a “tag” or an “epitope tag” refers to a sequence of amino acids, typically added to the N- or C-terminus of a polypeptide. The inclusion of tags fused to a polypeptide can facilitate polypeptide purification and/or detection. Tag or tag polypeptides include polypeptides that have sufficient residues to provide an epitope recognized by an antibody or to serve for detection or purification, yet are short enough to not interfere with an activity of the polypeptide to which it is linked. The tag polypeptide typically is sufficiently unique so an antibody that specifically binds thereto does not substantially cross-react with epitopes in the polypeptide to which it is linked. Suitable tag polypeptides generally have at least 5 or 6 amino acid residues and usually between about 8-50 amino acid residues, typically between 9-30 residues. The tags can be linked to one or more chimeric polypeptides in a multimer and permit detection of the multimer or its recovery from a sample or mixture. Such tags are well known and can be readily synthesized and designed. Exemplary tag polypeptides include those used for affinity purification and include, His tags, the influenza hemagglutinin (HA) tag polypeptide and its antibody 12CA5, (Field et al. (1988) Mol. Cell. Biol. 8:2159-2165); the c-myc tag and the 8F9, 3C7, 6E10, G4, B7 and 9E10 antibodies thereto (see, e.g., Evan et al. (1985) Molecular and Cellular Biology 5:3610-3616); and the Herpes Simplex virus glycoprotein D (gD) tag and its antibody (Paborsky et al. (1990) Protein Engineering 3:547-553 (1990).

[0285] As used herein, a fusion tagged polypeptide refers to a chimeric polypeptide containing an ECD polypeptide fused to a tag polypeptide.

[0286] As used herein, tethering refers to the interaction between two domains of a receptor monomer whereby the monomer occurs in a conformation that renders it less available for interaction. For example, subdomain II (S1) can interact in HER1, HER3 and HER4, with its subdomain IV (S2) domain, forming a tethered inactive structure. When in a tethered state, a receptor or isoform thereof is less available or unavailable for dimerization and/or receptor binding. The ECDs of the monomeric forms of HER1, HER3, and HER4 occur in a tethered form that exhibits lower ligand affinity than the untethered form. HER2, which lacks certain residues in subdomain IV, occurs in an untethered form and is available for dimerization with HER1, HER3 and HER4. Upon ligand binding to a tethered (monomeric) form, the tethering interaction is released and the ECD (or receptor) is in a conformation available for dimerization which involves interactions between domains II of two ECDs.

[0287] As used herein, reference herein to modulating the activity of a CSR or HER receptor, means that any activity of such receptor, such as ligand binding or other signal-transduction-related activity is altered.

[0288] As used herein, a back-to-back configuration refers to the configuration of two ECDs such that each is available for dimerization with a cell surface receptor. When in a back-to-back configuration, each ECD is part of a chimeric polypeptide that contains a multimerization domain that is oriented, upon formation of an ECD multimer, such that that each ECD, or portion thereof, is available for dimerization with a cell surface receptor.

[0289] As used herein, dimer and dimerize with reference to two chimeric polypeptides refers to the interaction between the two chimeric polypeptides. When appropriately dimerized, the ECDs in each or at least one of the chimeric polypeptides is/are available for dimerization with a cell surface receptor.

[0290] As used herein, “dimerization with a cell surface receptor” refers to the interaction of a cell surface receptor with an ECD in a multimer provided herein or with another cell surface receptor. The “dimer” or “dimerization” to which the language refers to will be clear from the context.

[0291] As used herein, a “polypeptide comprising a domain” refers to a polypeptide that contains a complete domain with reference to the corresponding domain of a cognate receptor. A complete domain is determined with reference to the definition of that particular domain within a cognate polypeptide. For example, a receptor isoform comprising a domain refers to an isoform that contains a domain corresponding to the complete domain as found in the cognate receptor. If a cognate receptor, for example, contains a transmembrane domain of 21 amino acids between amino acid positions 400-420, then a receptor isoform that comprises such transmembrane domain, contains a 21 amino acid domain that has substantial identity with the 21 amino acid domain of the cognate receptor. Substantial identity refers to a domain that can contain allelic variation and conservative substitutions as compared to the domain of the cognate receptor. Domains that are substantially identical do not have deletions, non-conservative substitutions, or insertions of amino acids compared to the domain of the cognate receptor.

[0292] As used herein, an allelic variant or allelic variation references to a polypeptide encoded by a gene that differs from a reference form of a gene (i.e., is encoded by an allele). Typically, the reference form of the gene encodes a wildtype form and/or predominant form of a polypeptide from a population or single reference member of a species. Typically, allelic variants, which include variants between and among species typically have at least 80%, 90% or greater amino acid identity with a wildtype and/or predominant form from the same species; the degree of identity depends upon the gene and whether comparison is interspecies or intraspecies.

[0293] Generally, intraspecies allelic variants have at least about 80%, 85%, 90% or 95% identity or greater with a wildtype and/or predominant form, including 96%, 97%, 98%, 99% or greater identity with a wildtype and/or predominant form of a polypeptide.

[0294] As used herein, species variants refer to variants of the same polypeptide between and among species. Generally, interspecies variants have at least about 60%, 70%, 80%, 85%, 90%, or 95% identity or greater with a wildtype and/or predominant form from another species, including 96%, 97%, 98%, 99% or greater identity with a wildtype and/or predominant form of a polypeptide.

[0295] As used herein, modification in reference to modification of a sequence of amino acids of a polypeptide or a sequence of nucleotides in a nucleic acid molecule and includes deletions, insertions, and replacements of amino acids and nucleotides, respectively.

[0296] As used herein, an open reading frame refers to a sequence of nucleotides or ribonucleotides in a nucleic acid molecule that encodes a functional polypeptide or a portion thereof, typically at least about fifty amino acids. An open reading frame can encode a full-length polypeptide or a portion thereof. An open reading frame can be generated by operatively linking one or more exons or an exon and intron, when the stop codon is in the intron and all or a portion of the intron is in a transcribed mRNA.

[0297] As used herein, a polypeptide refers to two or more amino acids covalently joined. The terms “polypeptide” and “protein” are used interchangeably herein.

[0298] As used herein, truncation or shortening, with reference to the shortening of a nucleic acid molecule or protein, refers to a sequence of nucleotides or ribonucleotides in a nucleic acid molecule or a sequence of amino acid residues in a polypeptide that is less than full-length compared to a wildtype or predominant form of the protein or nucleic acid molecule.

[0299] As used herein, a reference gene refers to a gene that can be used to map introns and exons within a gene. A reference gene can be genomic DNA or portion thereof, that can be compared with, for example, an expressed gene sequence, to map introns and exons in the gene. A reference gene also can be a gene encoding a wildtype or predominant form of a polypeptide.

[0300] As used herein, a family or related family of proteins or genes refers to a group of proteins or genes, respectively that have homology and/or structural similarity and/or functional similarity with each other.

[0301] As used herein, a premature stop codon is a stop codon occurring in the open reading frame of a nucleic acid molecule before the stop codon used to produce or create a full-length form of a protein, such as a wildtype or predominant form of a polypeptide. The occurrence of a premature stop codon can be the result of, for example, alternative splicing and mutation.

[0302] As used herein, a kinase is a protein that catalyzes phosphorylation of a molecule, typically a biomolecule, including macromolecules and small molecules. For example, the molecule can be a small molecule, or a protein. Phosphorylation includes auto-phosphorylation. Some kinases have constitutive kinase activity. Other kinases require activation. For example, many kinases that participate in signal transduction are phosphorylated. Phosphorylation activates their kinase activity on another biomolecule in a pathway. Some kinases are modulated by a change in protein structure and/or interaction with another molecule. For example, complexation of a protein or binding of a molecule to a kinase can activate or inhibit kinase activity.

[0303] As used herein, modulate and modulation refer to a change of an activity of a molecule, such as a protein. Exemplary activities include, but are not limited to, biological activities, such as signal transduction. Modulation can include an increase in the activity (i.e., up-regulation or agonist activity) a decrease in activity (i.e., down-regulation or inhibition) or any other alteration in an activity (such as a change in periodicity, frequency, duration, kinetics, or other parameter). Modulation can be context dependent and typically modulation is compared to a designated state, for example, the wildtype protein, the protein in a constitutive state, or the protein as expressed in a designated cell type or condition.

[0304] As used herein, inhibit and inhibition refer to a reduction in an activity relative to the uninhibited activity.

[0305] As used herein, a composition refers to any mixture. It can be a solution, a suspension, liquid, powder, a paste, aqueous, non-aqueous or any combination thereof.

[0306] As used herein, a combination refers to any association between or among two or more items. The combination can be two or more separate items, such as two compositions or two collections, can be a mixture thereof, such as a single mixture of the two or more items, or any variation thereof. The elements of a combination are generally functionally associated or related. A kit is a packaged combination that optionally includes instructions for use of the combination or elements thereof.

[0307] As used herein, a pharmaceutical effect or therapeutic effect refers to an effect observed upon administration of an agent intended for treatment of a disease or disorder or for amelioration of the symptoms thereof.

[0308] As used herein, angiogenesis refers to the formation of new blood vessels from existing ones; neovascularization refers to the formation of new vessels. Physiologic angiogenesis is tightly regulated and is essential to reproduction and embryonic development. During post-natal and adult life, angiogenesis occurs in wound repair and in exercised muscle and is generally restricted to days or weeks. In contrast, pathologic angiogenesis (or aberrant angiogenesis) can be persistent for months or years supporting the growth of solid tumors and leukemias, for example. It provides a conduit for the entry of inflammatory cells into sites of chronic inflammation (e.g., Crohn's disease and chronic cystitis). It is the most common cause of blindness; it destroys cartilage in rheumatoid arthritis and contributes to the growth and hemorrhage of atherosclerotic plaques. It leads to intraperitoneal bleeding in endometriosis. Tumor growth is angiogenesis-dependent. Tumors recruit their own blood supply by releasing factors that stimulate angiogenesis. Such factors include, VEGF, FGF, PDGF, TGF-β, Tek, EPHA2, AGE and others. AGE-RAGE interactions can elicit angiogenesis through transcriptional activation of the VEGF gene via NF-κB and AP-1 factors. VEGF is overproduced in a large number of human cancers, including breast, lung, colorectal.

[0309] As used herein, angiogenic diseases (or angiogenesis-related diseases) are diseases in which the balance of angiogenesis is altered or the timing thereof is altered. Angiogenic diseases include those in which an alteration of angiogenesis, such as undesirable vascularization, occurs. Such diseases include, but are not limited to cell proliferative disorders, including cancers, diabetic retinopathies and other diabetic complications, inflammatory diseases, endometriosis, and other diseases in which excessive vascularization is part of the disease process, including those noted above.

[0310] As used herein, HER (ErbB)-related diseases or HER receptor-mediated diseases are any diseases, conditions, or disorders in which a HER receptor and/or ligand is implicated in some aspect of the etiology, pathology, or development thereof. In particular, involvement includes, for example, expression or overexpression or activity of a HER receptor family member or ligand. Diseases, include, but are not limited to proliferative diseases, including cancers, such as, but not limited to, pancreatic, gastric, head and neck, cervical, lung, colorectal, endometrial, prostate, esophageal, ovarian, uterine, glioma, bladder, or breast cancer. Other conditions, include those involving cell proliferation and/or migration, including those involving pathological inflammatory responses, non-malignant hyperproliferative diseases, such as ocular conditions, skin conditions, conditions resulting from smooth muscle cell proliferation and/or migration, such as stenoses, including restenosis, atherosclerosis, muscle thickening of the bladder, heart or other muscles, endometriosis, or rheumatoid arthritis.

[0311] As used herein, treatment means any manner in which the symptoms of a condition, disorder or disease or other indication, are ameliorated or otherwise beneficially altered.

[0312] As used herein, therapeutic effect means an effect resulting from treatment of a subject that alters, typically improves, or ameliorates the symptoms of a disease or condition or that cures a disease or condition. A therapeutically effective amount refers to the amount of a composition, molecule or compound which results in a therapeutic effect following administration to a subject.

[0313] As used herein, the term “subject” refers to an animal, including a mammal, such as a human being.

[0314] As used herein, a “patient” refers to a human subject.

[0315] As used herein, an “individual” can be a subject.

[0316] As used herein, “animal” includes any animal, such as, but not limited to, primates including humans, gorillas, and monkeys; rodents, such as mice and rats; fowl, such as chickens; ruminants, such as goats, cows, deer, and sheep; pigs; and other animals. Non-human animals exclude humans as the contemplated animal. The polypeptides provided herein are from any source, animal, plant, prokaryotic and fungal. Most polypeptides are of animal origin, including mammalian origin, and generally, for therapeutic use, are human or humanized.

[0317] As used herein, a “composition” refers to any mixture. It can be a solution, suspension, liquid, powder, paste, aqueous, non-aqueous, or any combination thereof.

[0318] As used herein, a “stabilizing agent” refers to compound added to the formulation to protect either the antibody or conjugate, such as under the conditions (e.g., temperature) at which the formulations herein are stored or used. Thus, included are agents that prevent proteins from degradation from other components in the compositions. Exemplary of such agents are amino acids, amino acid derivatives, amines, sugars, polyols, salts and buffers, surfactants, inhibitors, or substrates and other agents as described herein.

[0319] As used herein, a “combination” refers to any association between or among two or more items. The combination can be two or more separate items, such as two compositions or two collections, a mixture thereof, such as a single mixture of the two or more items, or any variation thereof. The elements of a combination are generally functionally associated or related, such as elements used in a method.

[0320] As used herein, “combination therapy” refers to the administration of two or more different therapeutics, such as an anti-TNFR construct or such as an antibody or antigen-binding fragment thereof, provided herein, and one or more therapeutics or other treatment(s), such as radiation and surgery. Multiple therapeutic agents can be provided and administered separately, sequentially, intermittently, simultaneously, or in a single composition.

[0321] As used herein, a “kit” is a packaged combination that optionally includes other elements, such as additional reagents and instructions for use of the combination or elements thereof, for a purpose including, but not limited to, activation, administration, diagnosis, and assessment of a biological activity or property.

[0322] As used herein, normal levels or values can be defined in a variety of ways known to one of skill in the art. Typically, normal levels refer to the expression levels of a CSR or CSR ligand across a healthy population. The normal levels (or reference levels) are based on measurements of healthy subjects, such as from a specified source (i.e., blood, serum, tissue, or other source). Often, a normal level will be specified as a “normal range”, which typically refers to the range of values of the median 95% of the healthy population. Reference value is used interchangeably herein with normal level but can be different from normal levels depending on the subjects or the source. For example, a normal level of a CSR or ligand can differ between a patient that is 2-years old versus a patient that is 50-years old. Thus, the reference levels are typically dependent on the normal levels of a particular segment of the population. Thus, for purposes herein, a normal or reference level is a predetermined standard or control by which a test patient can be compared.

[0323] As used herein, elevated level refers to the any level of expression of a cell surface receptor (CSR) or CSR ligand that is increased above the normal or reference levels. Expression of a CSR or CSR ligand in a test subject can be compared to the normal or control levels of the CSR or ligand to determine if the level is elevated.

[0324] As used herein, an activity refers to a function or functioning or changes in or interactions of a biomolecule, such as polypeptide. Exemplary, but not limiting of such activities are: complexation, dimerization, multimerization, receptor-associated kinase activity or other enzymatic or catalytic activity, receptor-associated protease activity, phosphorylation, dephosphorylation, autophosphorylation, ability to form complexes with other molecules, ligand binding, catalytic or enzymatic activity, activation including auto-activation and activation of other polypeptides, inhibition or modulation of another molecule's function, stimulation or inhibition of signal transduction and/or cellular responses such as cell proliferation, migration, differentiation, and growth, degradation, membrane localization, membrane binding, and oncogenesis. An activity can be assessed by assays described herein and by any suitable assays known to those of skill in the art, including, but not limited to in vitro assays, including cell-based assays, in vivo assays, including assays in animal models for particular diseases.

[0325] As used herein, complexation refers to the interaction of two or more molecules such as two molecules of a protein to form a complex. The interaction can be by noncovalent and/or covalent bonds and includes, but is not limited to, hydrophobic and electrostatic interactions, Van der Waals forces and hydrogen bonds. Generally, protein-protein interactions involve hydrophobic interactions and hydrogen bonds. Complexation can be influenced by environmental conditions such as temperature, pH, ionic strength, and pressure, as well as protein concentrations.

[0326] As used herein, dimerization refers to the interaction of two molecules, such as two molecules of a receptor. Dimerization includes homodimerization where two identical molecules interact. Dimerization also includes heterodimerization in which two different molecules, such as two different receptor molecules, interact. Typically, dimerization involves two molecules that interact with each other through interaction of a dimerization domain or multimerization domain contained in each molecule. Similarly, multimerization, refers to interaction of a plurality of molecules to form dimers, trimers, or higher ordered oligomers, where the molecules are of the same type or are different.

[0327] As used herein, dimerization with reference to two chimeric polypeptides refers to the dimerization that occurs by virtue of interaction between multimerization domains of each. Receptor dimerization refers to the dimerization between two receptors leading to activation thereof, or between a receptor and an ECD portion capable of dimerizing with the receptor, such as an ECD multimer, that would then modulate the activation of the receptor thereof.

[0328] As used herein, in silico refers to research and experiments performed using a computer. In silico methods include, but are not limited to, molecular modeling studies, biomolecular docking experiments, and virtual representations of molecular structures and/or processes, such as molecular interactions.

[0329] As used herein, biological sample refers to any sample obtained from a living or viral source or other source of macromolecules and biomolecules, and includes any cell type or tissue of a subject from which nucleic acid or protein or other macromolecule can be obtained. The biological sample can be a sample obtained directly from a biological source or to sample that is processed. For example, isolated nucleic acids that are amplified constitute a biological sample. Biological samples include, but are not limited to, body fluids, such as blood, plasma, serum, cerebrospinal fluid, synovial fluid, urine and sweat, tissue and organ samples from animals and plants, and processed samples derived therefrom. Also included are soil and water samples and other environmental samples, viruses, bacteria, fungi, algae, protozoa, and components thereof.

[0330] As used herein, the term “nucleic acid” refers to single-stranded and/or double-stranded polynucleotides such as deoxyribonucleic acid (DNA), and ribonucleic acid (RNA) as well as analogs or derivatives of either RNA or DNA. Also included in the term “nucleic acid” are analogs of nucleic acids such as peptide nucleic acid (PNA), phosphorothioate DNA, and other such analogs and derivatives or combinations thereof. Nucleic acid can refer to polynucleotides such as deoxyribonucleic acid (DNA) and ribonucleic acid (RNA). The term also includes, as equivalents, derivatives, variants and analogs of either RNA or DNA made from nucleotide analogs, single (sense or antisense) and double-stranded polynucleotides. Deoxyribonucleotides include deoxyadenosine, deoxycytidine, deoxyguanosine and deoxythymidine. For RNA, the uracil base is uridine.

[0331] As used herein, “polynucleotide” refers to an oligomer or polymer containing at least two linked nucleotides or nucleotide derivatives, including a deoxyribonucleic acid (DNA), a ribonucleic acid (RNA), and a DNA or RNA derivative containing, for example, a nucleotide analog or a “backbone” bond other than a phosphodiester bond, for example, a phosphotriester bond, a phosphoramidate bond, a phosphorothioate bond, a thioester bond, or a peptide bond (peptide nucleic acid). The term “oligonucleotide” also is used herein essentially synonymously with “polynucleotide,” although those in the art recognize that oligonucleotides, for example, PCR primers, generally are less than about fifty to one hundred nucleotides in length. Polynucleotides include nucleotide analogs, include, for example, mass modified nucleotides, which allow for mass differentiation of polynucleotides; nucleotides containing a detectable label such as a fluorescent, radioactive, luminescent, or chemiluminescent label, which allow for detection of a polynucleotide; or nucleotides containing a reactive group such as biotin or a thiol group, which facilitates immobilization of a polynucleotide to a solid support. A polynucleotide also can contain one or more backbone bonds that are selectively cleavable, for example, chemically, enzymatically, or photolytically. For example, a polynucleotide can include one or more deoxyribonucleotides, followed by one or more ribonucleotides, which can be followed by one or more deoxyribonucleotides, such a sequence being cleavable at the ribonucleotide sequence by base hydrolysis. A polynucleotide also can contain one or more bonds that are relatively resistant to cleavage, for example, a chimeric oligonucleotide primer, which can include nucleotides linked by peptide nucleic acid bonds and at least one nucleotide at the 3′ end, which is linked by a phosphodiester bond or other suitable bond, and is capable of being extended by a polymerase. Peptide nucleic acid molecules can be prepared using well-known methods (see, for example, Weiler et al. Nucleic Acids Res. 25: 2792-2799 (1997)).

[0332] As used herein, oligonucleotides refer to polymers that include DNA, RNA, nucleic acid analogues, such as PNA, and combinations thereof. For purposes herein, primers and probes are single-stranded oligonucleotides or are partially single-stranded oligonucleotides.

[0333] As used herein, synthetic, with reference to, for example, a synthetic nucleic acid molecule or a synthetic gene or a synthetic peptide refers to a nucleic acid molecule or polypeptide molecule that is produced by recombinant methods and/or by chemical synthesis methods.

[0334] As used herein, production by recombinant techniques or methods using recombinant DNA methods means the use of the well-known methods of molecular biology for expressing proteins encoded by cloned DNA.

[0335] As used herein, the term “vector” refers to a nucleic acid molecule capable of transporting another nucleic acid to which it has been linked. One type of vector is an episome, i.e., a nucleic acid capable of extra chromosomal replication. Vectors include those capable of autonomous replication and/or expression of nucleic acids to which they are linked. Vectors capable of directing the expression of genes to which they are operatively linked are referred to herein as “expression vectors.” In general, expression vectors often are in the form of “plasmids,” which are generally circular double stranded DNA loops that, in their vector form are not bound to the chromosome. “Plasmid” and “vector” are used interchangeably as the plasmid is the most commonly used form of vector. Other such other forms of expression vectors that serve equivalent functions and that become known in the art subsequently hereto.

[0336] As used herein, the phrase “operatively linked” in reference to nucleic acid sequences generally means the nucleic acid molecules or segments thereof are covalently joined into one piece of nucleic acid such as DNA or RNA, whether in single or double stranded form. The segments are not necessarily contiguous, rather two or more components are juxtaposed so that the components are in a relationship permitting them to function in their intended manner. For example, segments of RNA (exons) can be operatively linked such as by splicing, to form a single RNA molecule. In another example, DNA segments can be operatively linked, whereby control or regulatory sequences on one segment control permit expression or replication or other such control of other segments. Thus, in the case of a regulatory region operatively linked to a reporter or any other polynucleotide, or a reporter or any polynucleotide operatively linked to a regulatory region, expression of the polynucleotide/reporter is influenced or controlled (e.g., modulated or altered, such as increased or decreased) by the regulatory region. For gene expression, a sequence of nucleotides and a regulatory sequence(s) are connected in such a way to control or permit gene expression when the appropriate molecular signal, such as transcriptional activator proteins, are bound to the regulatory sequence(s). Operative linkage of heterologous nucleic acid, such as DNA, to regulatory and effector sequences of nucleotides, such as promoters, enhancers, transcriptional and translational stop sites, and other signal sequences, refers to the relationship between such DNA and such sequences of nucleotides. For example, operative linkage of heterologous DNA to a promoter refers to the physical relationship between the DNA and the promoter such that the transcription of such DNA is initiated from the promoter by an RNA polymerase that specifically recognizes, binds to, and transcribes the DNA in reading frame.

[0337] As used herein, operative linkage of heterologous nucleic to regulatory and effector sequences of nucleotides, such as promoters, enhancers, transcriptional and translational stop sites, and other signal sequences refers to the relationship between such nucleic acid, such as DNA, and such sequences of nucleotides. For example, operative linkage of heterologous DNA to a promoter refers to the physical relationship between the DNA and the promoter such that the transcription of such DNA is initiated from the promoter by an RNA polymerase that specifically recognizes, binds to, and transcribes the DNA. Thus, operatively linked or operationally associated refers to the functional relationship of nucleic acid, such as DNA, with regulatory and effector sequences of nucleotides, such as promoters, enhancers, transcriptional and translational stop sites, and other signal sequences. In order to optimize expression and/or in vitro transcription, it can be necessary to remove, add or alter 5′ untranslated portions of the clones to eliminate extra, potentially inappropriate alternative translation initiation (i.e., start) codons or other sequences that can interfere with or reduce expression, either at the level of transcription or translation. Alternatively, consensus ribosome binding sites (see, e.g., Kozak J. Biol. Chem. 266:19867-19870 (1991)) can be inserted immediately 5′ of the start codon and can enhance expression. The desirability of (or need for) such modification can be empirically determined.

[0338] As used herein, the term “operatively linked” in reference to polypeptides, for example, such as when used in the context of the phrase “at least one subdomain or portion thereof of a cell surface receptor is operatively linked to another subdomain or portion thereof” means that they are the two amino acid sequences are joined by a peptide bond between a terminal amino acid residue in each sequence, to form a single amino acid residue sequence.

[0339] As used herein, the phrase “generated from a nucleic acid” in reference to the generating of a polypeptide, such as an isoform and intron fusion protein, includes the literal generation of a polypeptide molecule and the generation of a polypeptide by translation of a nucleic acid molecule.

[0340] As used herein, production with reference to a polypeptide refers to expression and recovery of expressed protein (or recoverable or isolatable expressed protein). Factors that can influence the production of a protein include the expression system and host cell chosen, the cell culture conditions, the secretion of the protein by the host cell, and ability to detect a protein for purification purposes. Production of a protein can be monitored by assessing the secretion of a protein, such as for example, into cell culture medium.

[0341] As used herein, secretion refers to the process by which a protein is transported into the external cellular environment or, in the case of gram-negative bacteria, into the periplasmic space. Generally, secretion occurs through a secretory pathway in a cell, for example, in eukaryotic cells this involves the endoplasmic reticulum and Golgi apparatus.

[0342] As used herein, homologous with reference to a molecule, such as a nucleic acid molecule or polypeptide, from different species refers to a corresponding molecule (i.e., a species variant). Such molecules typically are similar and generally share about 45% sequence identity or homology. One of skill in the art can identify homologs among species.

[0343] As used herein, heterologous nucleic acid is nucleic acid that is not normally produced in vivo by the cell in which it is expressed or that is produced by the cell but is at a different locus or expressed differently or that mediates or encodes mediators that alter expression of endogenous nucleic acid, such as DNA, by affecting transcription, translation, or other regulatable biochemical processes. Heterologous nucleic acid is generally not endogenous to the cell into which it is introduced, but has been obtained from another cell or prepared synthetically. Heterologous nucleic acid can be endogenous, but is nucleic acid that is expressed from a different locus or altered in its expression. Generally, although not necessarily, such nucleic acid encodes RNA and proteins that are not normally produced by the cell or in the same way in the cell in which it is expressed. Heterologous nucleic acid, such as DNA, also can be referred to as foreign nucleic acid, such as DNA. Thus, heterologous nucleic acid or foreign nucleic acid includes a nucleic acid molecule not present in the exact orientation or position as the counterpart nucleic acid molecule, such as DNA, is found in a genome. It also can refer to a nucleic acid molecule from another organism or species (i.e., exogenous). Heterologous nucleic acid with reference to an isolated nucleic acid molecule can refer to a portion of such molecule that is derived from a different source or locus from another portion of such a molecule. Exemplary of heterologous secretion signals include any presequence (i.e., signal sequence) or preprosequence that in not the endogenous signal sequence of an encoded molecule, such as, but not limited to, a tPA preprosequence, a preprogastrin sequence, and any other sequence known to one of skill in the art.

[0344] Similarly, heterologous with reference to a portion of polypeptide, refers to one portion of a chimeric polypeptide compared to the other. Hence in a hybrid ECD that contains subdomain I from HER1, subdomain II from HER2 and subdomain III from HER3, each subdomain is heterologous to each of the other subdomains.

[0345] A heterologous molecule can be derived from a different genetic source or species. Thus, molecules heterologous to a particular CSR ECD or isoform thereof include any molecule containing a sequence that is not derived from or endogenous to the CSR ECD or isoform thereof. Examples of heterologous molecules include secretion signals from a different polypeptide of the same or different species, a tag such as a fusion tag or label, or all or part of any other molecule. A heterologous molecule can be fused to a nucleic acid or polypeptide sequence of interest for the generation of a fusion or chimeric molecule or can be chemically linked via covalent or non-covalent linkages.

[0346] As used herein, a heterologous secretion signal refers to a signal sequence from a polypeptide, from the same or different species, that is different in sequence from the endogenous signal sequence. A heterologous secretion signal can be used in a host cell from which it is derived or it can be used host cells that differ from the cells from which the signal sequence is derived.

[0347] As used herein, an active portion a polypeptide, such as with reference to an active portion of an ECD, refers to a portion of polypeptide that has an activity.

[0348] As used herein, purification of a protein refers to the process of isolating a protein, such as from a homogenate, which can contain cell and tissue components, including DNA, cell membrane and other proteins. Proteins can be purified in any of a variety of ways known to those of skill in the art, such as for example, according to their isoelectric points by running them through a pH graded gel or an ion exchange column, according to their size or molecular weight via size exclusion chromatography or by SDS-PAGE (sodium dodecyl sulfate-polyacrylamide gel electrophoresis) analysis, or according to their hydrophobicity. Other purification techniques include, but are not limited to, precipitation or affinity chromatography, including immuno-affinity chromatography, and others and methods that include combination of any of these methods. Furthermore, purification can be facilitated by including a tag on the molecule, such as a His tag for affinity purification or a detectable marker for identification.

[0349] As used herein, “isolated,” with reference to a molecule, such as a nucleic acid molecule, oligonucleotide, polypeptide, or antibody, indicates that the molecule has been altered by the hand of man from how it is found in its natural environment. For example, a molecule produced by and/or contained within a recombinant host cell is considered “isolated” Likewise, a molecule that has been purified, partially or substantially, from a native source or recombinant host cell, or produced by synthetic methods, is considered “isolated.” Depending on the intended application, an isolated molecule can be present in any form, such as in an animal, cell or extract thereof; dehydrated, in vapor, solution or suspension; or immobilized on a solid support.

[0350] As used herein, a substantially pure polypeptide or an isolated polypeptide (or other molecule) are used interchangeably and mean the polypeptide has been purified from a source or sample homogeneity as detected by chromatographic techniques or other such techniques, such as SDS-PAGE under non-reducing or reducing conditions using, for example Coomassie blue or silver stain. Homogeneity typically means less than about 5% or less than 5% contamination with other source proteins.

[0351] As used herein, detection includes methods that permit visualization (by eye or equipment) of a protein. A protein can be visualized using an antibody specific to the protein. Detection of a protein can be facilitated by fusion of a protein with a tag including an epitope tag or label.

[0352] As used herein, a label refers to a detectable compound or composition which is conjugated directly or indirectly to a polypeptide so as to generate a labeled polypeptide. The label can be detectable by itself (e.g., radioisotope labels or fluorescent labels) or, in the case of an enzymatic label, can catalyze chemical alteration of a substrate compound composition which is detectable. Non-limiting examples of labels included fluorogenic moieties, green fluorescent protein, or luciferase.

[0353] As used herein, expression refers to the process by which a gene's coded information is converted into the structures present and operating in the cell. Expressed genes include those that are transcribed into mRNA and then translated into protein and those that are transcribed into RNA but not translated into protein (e.g., transfer and ribosomal RNA). For purposes herein, a protein that is expressed can be retained inside the cells, such as in the cytoplasm, or can be secreted from the cell.

[0354] As used herein, a promoter region refers to the portion of DNA of a gene that controls transcription of the DNA to which it is operatively linked. The promoter region includes specific sequences of DNA that are sufficient for RNA polymerase recognition, binding and transcription initiation. This portion of the promoter region is referred to as the promoter. In addition, the promoter region includes sequences that modulate this recognition, binding and transcription initiation activity of the RNA polymerase. These sequences can be cis acting or can be responsive to trans-acting factors. Promoters, depending upon the nature of the regulation, can be constitutive or regulated.

[0355] As used herein, regulatory region means a cis-acting nucleotide sequence that influences expression, positively or negatively, of an operatively linked gene. Regulatory regions include sequences of nucleotides that confer inducible (i.e., require a substance or stimulus for increased transcription) expression of a gene. When an inducer is present or at increased concentration, gene expression can be increased. Regulatory regions also include sequences that confer repression of gene expression (i.e., a substance or stimulus decreases transcription). When a repressor is present or at increased concentration gene expression can be decreased. Regulatory regions are known to influence, modulate or control many in vivo biological activities including cell proliferation, cell growth and death, cell differentiation and immune modulation. Regulatory regions typically bind to one or more trans-acting proteins, which results in either increased or decreased transcription of the gene. Exemplary of gene regulatory regions are promoters and enhancers. Promoters are sequences located around the transcription or translation start site, typically positioned 5′ of the translation start site. Promoters usually are located within 1 Kb of the translation start site, but can be located further away, for example, 2 Kb, 3 Kb, 4 Kb, 5 Kb or more, up to an including 10 Kb. Enhancers are known to influence gene expression when positioned 5′ or 3′ of the gene, or when positioned in or a part of an exon or an intron. Enhancers also can function at a significant distance from the gene, for example, at a distance from about 3 Kb, 5 Kb, 7 Kb, 10 Kb, 15 Kb or more.

[0356] Regulatory regions also include, in addition to promoter regions, sequences that facilitate translation, splicing signals for introns, maintenance of the correct reading frame of the gene to permit in-frame translation of mRNA and, stop codons, leader sequences and fusion partner sequences, internal ribosome binding sites (IRES) elements for the creation of multigene, or polycistronic, messages, polyadenylation signals to provide proper polyadenylation of the transcript of a gene of interest and stop codons and can be optionally included in an expression vector.

[0357] As used herein, the “amino acids,” which occur in the various amino acid sequences appearing herein, are identified according to their well-known, three-letter or one-letter abbreviations (see Table 1). The nucleotides, which occur in the various DNA fragments, are designated with the standard single-letter designations used routinely in the art.

[0358] As used herein, “amino acid residue” refers to an amino acid formed upon chemical digestion (hydrolysis) of a polypeptide at its peptide linkages. The amino acid residues described herein are generally in the “L” isomeric form. Residues in the “D” isomeric form can be substituted for any L-amino acid residue, as long as the desired functional property is retained by the polypeptide. NH₂ refers to the free amino group present at the amino terminus of a polypeptide. COOH refers to the free carboxy group present at the carboxyl terminus of a polypeptide. In keeping with standard polypeptide nomenclature described in J. Biol. Chem., 243:3557-59 (1968), and adopted at 37 C.F.R. §§ 1.821-1.822, abbreviations for amino acid residues are shown in the following Table:

TABLE 1
Table of Correspondence

SYMBOL

| 1-Letter | 3-Letter | AMINO ACID |
|---|---|---|
| Y | Tyr | Tyrosine |
| G | Gly | Glycine |
| F | Phe | Phenylalanine |
| M | Met | Methionine |
| A | Ala | Alanine |
| S | Ser | Serine |
| I | Ile | Isoleucine |
| L | Leu | Leucine |
| T | Thr | Threonine |
| V | Val | Valine |
| P | Pro | Proline |
| K | Lys | Lysine |
| H | His | Histidine |
| Q | Gln | Glutamine |
| E | Glu | Glutamic acid |
| Z | Glx | Glutamic Acid and/or Glutamine |
| W | Trp | Tryptophan |
| R | Arg | Arginine |
| D | Asp | Aspartic acid |
| N | Asn | Asparagine |
| B | Asx | Aspartic Acid and/or Asparagine |
| C | Cys | Cysteine |
| X | Xaa | Unknown or other |

[0359] All sequences of amino acid residues represented herein by a formula have a left to right orientation in the conventional direction of amino-terminus to carboxyl-terminus. In addition, the phrase “amino acid residue” is defined to include the amino acids listed in the Table of Correspondence (below), modified, non-natural and unusual amino acids. Furthermore, a dash at the beginning or end of an amino acid residue sequence indicates a peptide bond to a further sequence of one or more amino acid residues, or to an amino-terminal group, such as NH₂, or to a carboxyl-terminal group, such as COOH. In a peptide or protein, suitable conservative substitutions of amino acids are known to those of skill in the art and generally can be made without altering a biological activity of a resulting molecule. Those of skill in the art recognize that, in general, single amino acid substitutions in non-essential regions of a polypeptide do not substantially alter biological activity (see, e.g., Watson et al., Molecular Biology of the Gene, 4th Edition, 1987, The Benjamin/Cummings Pub. Co., p. 224). Such substitutions can be made in accordance with the exemplary substitutions set forth as follows:

TABLE 2
Exemplary Conservative Amino Acid Substitutions

| Original Residue | Conservative Substitution |
|---|---|
| Ala (A) | Gly; Ser |
| Arg (R) | Lys |
| Asn (N) | Gln; His |
| Cys (C) | Ser |
| Gln (Q) | Asn |
| Glu (E) | Asp |
| Gly (G) | Ala; Pro |
| His (H) | Asn; Gln |
| Ile (I) | Leu; Val |
| Leu (L) | Ile; Val |
| Lys (K) | Arg; Gln; Glu |
| Met (M) | Leu; Tyr; Ile |
| Phe (F) | Met; Leu; Tyr |
| Ser (S) | Thr |
| Thr (T) | Ser |
| Trp (W) | Tyr |
| Tyr (Y) | Trp; Phe |
| Val (V) | Ile; Leu |

[0360] Other substitutions, including non-conservative changes, also are permissible and can be determined empirically or in accord with other known conservative or non-conservative substitutions.

[0361] As used herein, all sequences of amino acid residues represented herein by a formula have a left to right orientation in the conventional direction of amino-terminus to carboxyl-terminus. In addition, the phrase “amino acid residue” is defined to include the amino acids listed in the Table of Correspondence modified, non-natural and unusual amino acids. Furthermore, it should be noted that a dash at the beginning or end of an amino acid residue sequence indicates a peptide bond to a further sequence of one or more amino acid residues or to an amino-terminal group such as NH₂ or to a carboxyl-terminal group such as COOH.

[0362] As used herein, “naturally occurring amino acids” refer to the 20 L-amino acids that occur in polypeptides.

[0363] As used herein, the term “non-natural amino acid” refers to an organic compound that has a structure similar to a natural amino acid but has been modified structurally to mimic the structure and reactivity of a natural amino acid. Non-naturally occurring amino acids thus include, for example, amino acids or analogs of amino acids other than the 20 naturally occurring amino acids and include, but are not limited to, the D-stereoisomers of amino acids. Exemplary non-natural amino acids are known to those of skill in the art, and include, but are not limited to, 2-Aminoadipic acid (Aad), 3-Aminoadipic acid (bAad), β-alanine/β-Amino-propionic acid (Bala), 2-Aminobutyric acid (Abu), 4-Aminobutyric acid/piperidinic acid (4Abu), 6-Aminocaproic acid (Acp), 2-Aminoheptanoic acid (Ahe), 2-Aminoisobutyric acid (Aib), 3-Aminoisobutyric acid (Baib), 2-Aminopimelic acid (Apm), 2,4-Diaminobutyric acid (Dbu), Desmosine (Des), 2,2′-Diaminopimelic acid (Dpm), 2,3-Diaminopropionic acid (Dpr), N-Ethylglycine (EtGly), N-Ethylasparagine (EtAsn), Hydroxylysine (Hyl), allo-Hydroxylysine (Ahyl), 3-Hydroxyproline (3Hyp), 4-Hydroxyproline (4Hyp), Isodesmosine (Ide), allo-Isoleucine (Aile), N-Methylglycine, sarcosine (MeGly), N-Methylisoleucine (MeIle), 6-N-Methyllysine (MeLys), N-Methylvaline (MeVal), Norvaline (Nva), Norleucine (Nle), and Ornithine (Orn).

[0364] As used herein, a peptidomimetic is a compound that mimics the conformation and certain stereochemical features of the biologically active form of a particular peptide. In general, peptidomimetics are designed to mimic certain desirable properties of a compound, but not the undesirable properties, such as flexibility, that lead to a loss of a biologically active conformation and bond breakdown. Peptidomimetics can be prepared from biologically active compounds by replacing certain groups or bonds that contribute to the undesirable properties with bioisosteres. Bioisosteres are known to those of skill in the art. For example, the methylene bioisostere CH2S has been used as an amide replacement in enkephalin analogs (see, e.g., Spatola (1983) pp. 267-357 in Chemistry and Biochemistry of Amino Acids, Peptides, and Proteins, Weinstein, Ed. volume 7, Marcel Dekker, New York). Morphine, which can be administered orally, is a compound that is a peptidomimetic of the peptide endorphin. For purposes herein, cyclic peptides are included among peptidomimetics as are polypeptides in which one or more peptide bonds is/are replaced by a mimic. The heteromultimers and multimers and hybrid ECDs and chimeric polypeptides provided herein can be modified by replacing bonds with mimetics and such molecules are provided herein.

[0365] As used herein, “similarity” between two proteins or nucleic acids refers to the relatedness between the amino acid sequences of the proteins or the nucleotide sequences of the nucleic acids. Similarity can be based on the degree of identity and/or homology of sequences and the residues contained therein. Methods for assessing the degree of similarity between proteins or nucleic acids are known to those of skill in the art. For example, in one method of assessing sequence similarity, two amino acid or nucleotide sequences are aligned in a manner that yields a maximal level of identity between the sequences. “Identity” refers to the extent to which the amino acid or nucleotide sequences are invariant. Alignment of amino acid sequences, and to some extent nucleotide sequences, also can take into account conservative differences and/or frequent substitutions in amino acids (or nucleotides). Conservative differences are those that preserve the physico-chemical properties of the residues involved. Alignments can be global (alignment of the compared sequences over the entire length of the sequences and including all residues) or local (the alignment of a portion of the sequences that includes only the most similar region or regions).

[0366] As used herein, identity has an art-recognized meaning and can be calculated using published techniques. (See, e.g.: Computational Molecular Biology, Lesk, A. M., ed., Oxford University Press, New York, 1988; Biocomputing: Informatics and Genome Projects, Smith, D. W., ed., Academic Press, New York, 1993; Computer Analysis of Sequence Data, Part I, Griffin, A. M., and Griffin, H. G., eds., Humana Press, New Jersey, 1994; Sequence Analysis in Molecular Biology, von Heinje, G., Academic Press, 1987; and Sequence Analysis Primer, Gribskov, M. and Devereux, J., eds., M Stockton Press, New York, 1991).

[0367] As used herein, sequence identity refers to the percentage of identity of an amino acid sequence of an isoform or test polypeptide along its full-length to a reference polypeptide, designated by a specified SEQ ID, along its full length. For example, if a polypeptide A has 100 amino acids and polypeptide B has 95 amino acids, identical to amino acids 1-95 of polypeptide A, then polypeptide B has 95% identity when sequence identity is compared along the full length of a polypeptide A compared to full length of polypeptide B. Typically, where an isoform polypeptide or a reference polypeptide is a mature polypeptide lacking a signal sequence, sequence identity is compared along the full length of the polypeptides, excluding the signal sequence portion. For example, if an isoform lacks a signal peptide but a reference polypeptide contains a signal peptide, comparison along the full length of both polypeptides for determination of sequence identity excludes the signal sequence portion of the reference polypeptide. Various programs and methods for assessing identity are known to those of skill in the art. For example, a global alignment, such as using the Needleman-Wunsch global alignment algorithm, can be used to find the optimum alignment and identity of two sequences when considering the entire length. High levels of identity, such as 90% or 95% identity, readily can be determined without software. Thus, “sequence identity” refers to the number of identical or similar amino acids or nucleotide bases in a comparison between a test and a reference polypeptide or polynucleotide. Sequence identity can be determined by sequence alignment of nucleic acid or protein sequences to identify regions of similarity or identity. For purposes herein, sequence identity is generally determined by alignment to identify identical residues and counting or determining the number of differences, including insertions, replacements, and deletions, and calculating the percentage of differences between the reference sequence and test sequence and subtracting from 100. If the reference sequence is 100 amino acids long, and the test sequence can vary by 5%, the test sequence, when aligned to maximize matches, can differs by 5 amino acids (substitutions or replacement, insertions, or deletions, or missing residues).

[0368] As used herein, “corresponding residues” in a polypeptide or nucleic acid molecule are determined by alignment with a reference polypeptides or nucleic acid.

[0369] As used herein, by homologous (with respect to nucleic acid and/or amino acid sequences) means about greater than or equal to 25% sequence homology, typically greater than or equal to 25%, 40%, 60%, 70%, 80%, 85%, 90% or 95% 90% or 95% sequence homology; the precise percentage can be specified if necessary. For purposes herein the terms “homology” and “identity” often are used interchangeably, unless otherwise indicated. In general, for determination of the percentage homology or identity, sequences are aligned so that the highest order match is obtained (see, e.g.: Computational Molecular Biology, Lesk, A. M., ed., Oxford University Press, New York, 1988; Biocomputing: Informatics and Genome Projects, Smith, D. W., ed., Academic Press, New York, 1993; Computer Analysis of Sequence Data, Part I, Griffin, A. M., and Griffin, H. G., eds., Humana Press, New Jersey, 1994; Sequence Analysis in Molecular Biology, von Heinje, G., Academic Press, 1987; and Sequence Analysis Primer, Gribskov, M. and Devereux, J., eds., M Stockton Press, New York, 1991; Carillo et al. (1988) SIAM J Applied Math 48:1073). By sequence homology, the number of conserved amino acids is determined by standard alignment algorithms programs, and can be used with default gap penalties established by each supplier. Substantially homologous nucleic acid molecules would hybridize typically at moderate stringency or at high stringency all along the length of the nucleic acid of interest. Also contemplated are nucleic acid molecules that contain degenerate codons in place of codons in the hybridizing nucleic acid molecule. Whether any two nucleic acid molecules have nucleotide sequences that are at least 60%, 70%, 80%, 85%, 90%, 95%, 96%, 97%, 98% or 99% “identical” or “homologous” can be determined using known computer algorithms such as the “FASTA” program, using for example, the default parameters as in Pearson et al. (1988) Proc. NatL. Acad. Sci. USA 85:2444 (other programs include the GCG program package (Devereux, J., et al., Nucleic Acids Research 12(1):387 (1984)), BLASTP, BLASTN, FASTA (Atschul, S. F., et al., J Molec Biol 215:403 (1990); Guide to Huge Computers, Martin J. Bishop, ed., Academic Press, San Diego, 1994, and Carillo et al. (1988) SIAM J Applied Math 48:1073). For example, the BLAST function of the National Center for Biotechnology Information database can be used to determine identity. Other commercially or publicly available programs include, DNAStar “MegAlign” program (Madison, Wis.) and the University of Wisconsin Genetics Computer Group (UWG) “Gap” program (Madison Wis.)). Percent homology or identity of proteins and/or nucleic acid molecules can be determined, for example, by comparing sequence information using a GAP computer program (e.g., Needleman et al. (1970) J Mol. Biol. 48:443, as revised by Smith and Waterman ((1981) Adv. Appl. Math. 2:482). Briefly, the GAP program defines similarity as the number of aligned symbols (i.e., nucleotides or amino acids), which are similar, divided by the total number of symbols in the shorter of the two sequences. Default parameters for the GAP program can include: (1) a unary comparison matrix (containing a value of 1 for identities and 0 for non-identities) and the weighted comparison matrix of Gribskov et al. (1986) Nucl. Acids Res. 14:6745, as described by Schwartz and Dayhoff, eds., ATLAS OF PROTEIN SEQUENCE AND STRUCTURE, National Biomedical Research Foundation, pp. 353-358 (1979); (2) a penalty of 3.0 for each gap and an additional 0.10 penalty for each symbol in each gap; and (3) no penalty for end gaps. For purposes herein, gaps or deletions are considered differences in sequences

[0370] As used herein, the term “identity” or “homology” represents a comparison between a test and a reference polypeptide or polynucleotide.

[0371] As used herein, the term “identity” represents a comparison or alignment between a test and a reference polypeptide or polynucleotide. In one non-limiting example, “at least 90% identical to” refers to percent identities from 90% to 100%, relative to the reference polypeptide or polynucleotide. Identity at a level of 90% or more is indicative of the fact that, assuming for exemplification purposes, when a test and reference polypeptide or polynucleotide with a length of 100 amino acids or nucleotides are compared, no more than 10% (i.e., 10 out of 100) of amino acids or nucleotides in the test polypeptide or polynucleotide differ from those of the reference polypeptide or polynucleotide. The two polypeptides are aligned to maximize identity, and the number of differences (insertions, deletions, amino acid differences) is counted and the percentage based on the length of the reference polypeptide calculated. For example, if the reference polypeptide has 100 amino acids, and the test polypeptide has 10 amino acid differences, including by virtue of a shorter length, the sequence identity is 90%.

[0372] Similar comparisons can be made between a test and reference polynucleotide. Such differences can be represented as point mutations randomly distributed over the entire length of an amino acid sequence, or they can be clustered in one or more locations of varying length, up to the maximum allowable, e.g., 10/100 amino acid difference (approximately 90% identity). Differences also can be due to deletions or truncations of amino acid residues. Differences are defined as nucleic acid or amino acid substitutions, insertions, or deletions. Depending on the length of the compared sequences, at the level of homologies or identities above about 85-90%, the result can be independent of the program and gap parameters set; such high levels of identity can be assessed readily, often without relying on software.

[0373] For example, the term at least “90% identical to” refers to percent identities from 90 to 99.99 relative to the reference nucleic acid or amino acid sequences. Identity at a level of 90% or more is indicative of the fact that, assuming for exemplification purposes a test and reference polypeptide length of 100 amino acids are compared. No more than 10% (i.e., 10 out of 100) amino acids in the test polypeptide differs from that of the reference polypeptide. Similar comparisons can be made between test and reference polynucleotides. Such differences can be represented as point mutations randomly distributed over the entire length of an amino acid sequence or they can be clustered in one or more locations of varying length up to the maximum allowable, e.g., 10/100 amino acid difference (approximately 90% identity). Differences are defined as nucleic acid or amino acid substitutions, insertions, or deletions. At the level of homologies or identities above about 85-90%, the result should be independent of the program and gap parameters set; such high levels of identity can be assessed readily, often by manual alignment without relying on software. For purposes herein, sequence identity is determined by aligning the sequences for the maximum number of matches, and counting differences, including deletions, and comparing to the sequence at issue. For example, if a claimed sequence of 100 amino acids includes sequences that have at least 95% then the polypeptides with up to 5 amino acid differences, which include insertions, deletions, and/or replacements.

[0374] As used herein, an aligned sequence refers to the use of homology (similarity and/or identity) to align corresponding positions in a sequence of nucleotides or amino acids. Typically, two or more sequences that are related by 50% or more identity are aligned. An aligned set of sequences refers to 2 or more sequences that are aligned at corresponding positions and can include aligning sequences derived from RNAs, such as ESTs and other cDNAs, aligned with genomic DNA sequence.

[0375] As used herein, a polypeptide comprising a specified percentage of amino acids set forth in a reference polypeptide refers to the proportion of contiguous identical amino acids shared between a polypeptide and a reference polypeptide. For example, an isoform that comprises 70% of the amino acids set forth in a reference polypeptide having a sequence of amino acids set forth in in a particular SEQ ID No., which, for example, recites 147 amino acids, means that the reference polypeptide contains at least 103 contiguous amino acids set forth in the amino acid sequence of SEQ ID No.

[0376] As used herein, “primer” refers to an oligonucleotide containing two or more deoxyribonucleotides or ribonucleotides, generally more than three, from which synthesis of a primer extension product can be initiated. A primer can act as a point of initiation of template-directed DNA synthesis under appropriate conditions (e.g., in the presence of four different nucleoside triphosphates and a polymerization agent, such as DNA polymerase, RNA polymerase or reverse transcriptase) in an appropriate buffer and at a suitable temperature. Experimental conditions conducive to synthesis include the presence of nucleoside triphosphates and an agent for polymerization and extension, such as DNA polymerase, and a suitable buffer, temperature, and pH. Certain nucleic acid molecules can serve as a “probe” and as a “primer.” A primer, however, as a 3′ hydroxyl group for extension. A primer can be used in a variety of methods, including, for example, polymerase chain reaction (PCR), reverse-transcriptase (RT)-PCR, RNA PCR, LCR, multiplex PCR, panhandle PCR, capture PCR, expression PCR, 3′ and 5′ RACE, in situ PCR, ligation-mediated PCR and other amplification protocols.

[0377] As used herein, “primer pair” refers to a set of primers that includes a 5′ (upstream) primer that hybridizes with the 5′ end of a sequence to be amplified (e.g., by PCR) and a 3′ (downstream) primer that hybridizes with the complement of the 3′ end of the sequence to be amplified.

[0378] As used herein, “specifically hybridizes” refers to annealing, by complementary base-pairing, of a nucleic acid molecule (e.g., an oligonucleotide) to a target nucleic acid molecule. Those of skill in the art are familiar with in vitro and in vivo parameters that affect specific hybridization, such as length and composition of the particular molecule. Parameters particularly relevant to in vitro hybridization further include annealing and washing temperature, buffer composition and salt concentration. Exemplary washing conditions for removing non-specifically bound nucleic acid molecules at high stringency are 0.1×SSPE, 0.1% SDS, 65° C., and at medium stringency are 0.2×SSPE, 0.1% SDS, 50° C. Equivalent stringency conditions are known in the art. The skilled person can readily adjust these parameters to achieve specific hybridization of a nucleic acid molecule to a target nucleic acid molecule appropriate for a particular application.

[0379] As used herein, an effective amount is the quantity of a therapeutic agent necessary for preventing, curing, ameliorating, arresting or partially arresting a symptom of a disease or disorder.

[0380] As used herein, a “unit dose form” refers to physically discrete units suitable for human and animal subjects, and packaged individually, as is known in the art.

[0381] As used herein, a “single dosage formulation” refers to a formulation for direct administration.

[0382] As used herein, a “multi-dose formulation” refers to a formulation that contains multiple doses of a therapeutic agent and that can be directly administered to provide several single doses of the therapeutic agent. The doses can be administered over the course of minutes, hours, weeks, days, or months. Multi-dose formulations can allow dose adjustment, dose-pooling, and/or dose-splitting. Because multi-dose formulations are used over time, they generally contain one or more preservatives to prevent microbial growth.

[0383] As used herein, an “article of manufacture” is a product that is made and sold. As used throughout this application, the term is intended to encompass any of the compositions provided herein contained in articles of or for packaging.

[0384] As used herein, a “fluid” refers to any composition that can flow. Fluids thus encompass compositions that are in the form of semi-solids, pastes, solutions, aqueous mixtures, gels, lotions, creams, and other such compositions.

[0385] As used herein, an isolated or purified polypeptide or protein (e.g., an isolated antibody or antigen-binding fragment thereof), or biologically-active portion thereof (e.g., an isolated antigen-binding fragment), is substantially free of cellular material or other contaminating proteins from the cell or tissue from which the protein is derived, or substantially free from chemical precursors or other chemicals when chemically synthesized. Preparations can be determined to be substantially free if they appear free of readily detectable impurities as determined by standard methods of analysis, such as thin layer chromatography (TLC), gel electrophoresis, and high performance liquid chromatography (HPLC), used by those of skill in the art to assess such purity, or sufficiently pure such that further purification does not detectably alter the physical and chemical properties, such as enzymatic and biological activities, of the substance. Methods for purification of the compounds to produce substantially chemically pure compounds are known to those of skill in the art. A substantially chemically pure compound, however, can be a mixture of stereoisomers. In such instances, further purification might increase the specific activity of the compound.

[0386] As used herein, a “cellular extract” or “lysate” refers to a preparation or fraction which is made from a lysed or disrupted cell.

[0387] As used herein, a “control” refers to a sample that is substantially identical to the test sample, except that it is not treated with a test parameter, or, if it is a plasma sample, it can be from a normal volunteer not affected with the condition of interest. A control also can be an internal control.

[0388] As used herein, the singular forms “a,” “an” and “the” include plural referents unless the context clearly dictates otherwise. Thus, for example, reference to compound, comprising “an extracellular domain” includes compounds with one or a plurality of extracellular domains.

[0389] As used herein, ranges and amounts can be expressed as “about” a particular value or range. About also includes the exact amount. Hence “about 5 bases” means “about 5 bases” and also “5 bases.”

[0390] As used herein, “optional” or “optionally” means that the subsequently described event or circumstance does or does not occur, and that the description includes instances where said event or circumstance occurs and instances where it does not. For example, an optionally substituted group means that the group is unsubstituted or is substituted.

[0391] As used herein, the abbreviations for any protective groups, amino acids, and other compounds, are, unless indicated otherwise, in accord with their common usage, recognized abbreviations, or the IUPAC-IUB Commission on Biochemical Nomenclature (see, Biochem. (1972) 11(9):1726-1732).

[0392] As used herein, a construct is a product that contains one more components, generally at least two. The components can be polypeptides, small molecules, aptamers, nucleic acids, and/or other such components as described herein or known to those of skill in the art. Various constructs are described and exemplified herein; the components and variety thereof is apparent from the description herein. Those of skill in the art in view of the description can envision other constructs that are within the disclosure and claims herein. The term construct is employed because the products can include a variety of different types of components.

[0393] As used herein, a construct that is a multi-specific construct is a construct that comprises more than monomer.

[0394] As used herein, a “modification” is in reference to the modification of a sequence of amino acids in a polypeptide, or a sequence of nucleotides in a nucleic acid molecule, and includes deletions, insertions, transpositions, replacements, and combinations thereof of amino acids or nucleotides, respectively. Methods of modifying a polypeptide or nucleic acid are routine to those of skill in the art, such as by using recombinant DNA methodologies.

[0395] As used herein, “deletion,” when referring to a nucleic acid or polypeptide sequence, refers to the deletion of one or more nucleotides or amino acids compared to a sequence, such as a target polynucleotide or polypeptide, or a native or wild-type sequence.

[0396] As used herein, “insertion,” when referring to a nucleic acid or amino acid sequence, describes the inclusion of one or more additional nucleotides or amino acids, within a target, native, wild-type or other related sequence. Thus, a nucleic acid molecule that contains one or more insertions compared to a wild-type sequence, contains one or more additional nucleotides within the linear length of the sequence.

[0397] As used herein, “addition,” when referring to a nucleic acid or amino acid sequence, describes the addition of one or more nucleotides or amino acids onto either termini, compared to another sequence.

[0398] As used herein, a “substitution” or “replacement” refers to the replacing of one or more nucleotides or amino acids in a native, target, wild-type or other nucleic acid or polypeptide sequence, with an alternative nucleotide or amino acid, without changing the length (as described in numbers of residues) of the molecule. Thus, one or more substitutions in a molecule does not change the number of amino acid residues or nucleotides of the molecule. Amino acid replacements compared to a particular polypeptide can be expressed in terms of the number of the amino acid residue along the length of the polypeptide sequence. For example, a modified polypeptide having a modification in the amino acid at the 100th position of the amino acid sequence that is a substitution/replacement of tyrosine (Tyr; Y) with glutamic acid (Glu; E), can be expressed as Y100E, Tyr100Glu, or 100E. Y100 can be used to indicate that the amino acid at the modified 100th position is a tyrosine. For purposes herein, since modifications are in a heavy chain (HC) or light chain (LC) of an antibody, modifications also can be denoted by reference to HC- or LC- to indicate the chain of the polypeptide.

[0399] As used herein, “at a position corresponding to,” or recitation that nucleotides or amino acid positions “correspond to” nucleotides or amino acid positions in a disclosed sequence, such as set forth in the Sequence Listing, refers to nucleotides or amino acid positions identified upon alignment with a referenced sequence to maximize identity using a standard alignment algorithm, such as the GAP algorithm. By aligning the sequences, one skilled in the art can identify corresponding residues, for example, using conserved and identical amino acid residues as guides. In general, to identify corresponding positions, the sequences of amino acids are aligned so that the highest order match is obtained (see, e.g., Computational Molecular Biology, Lesk, A.M., ed., Oxford University Press, New York, 1988; Biocomputing: Informatics and Genome Projects, Smith, D. W., ed., Academic Press, New York, 1993; Computer Analysis of Sequence Data, Part I, Griffin, A. M., and Griffin, H.G., eds., Humana Press, New Jersey, 1994; Sequence Analysis in Molecular Biology, von Heinje, G., Academic Press, 1987; Sequence Analysis Primer, Gribskov, M. and Devereux, J., eds., M Stockton Press, New York, 1991; and Carrillo et al. (1988) SIAM J. Applied Math 48:1073).

[0400] As used herein, alignment of a sequence refers to the use of homology to align two or more sequences of nucleotides or amino acids. Typically, two or more sequences that are related by 50% or more identity are aligned. An aligned set of sequences refers to 2 or more sequences that are aligned at corresponding positions and can include aligning sequences derived from RNAs, such as ESTs and other cDNAs, aligned with a genomic DNA sequence. Related or variant polypeptides or nucleic acid molecules can be aligned by any method known to those of skill in the art. Such methods typically maximize matches, and include methods, such as using manual alignments and by using the numerous alignment programs available (e.g., BLASTP) and others known to those of skill in the art. By aligning the sequences of polypeptides or nucleic acids, one skilled in the art can identify analogous portions or positions, using conserved and identical amino acid residues as guides. Further, one skilled in the art also can employ conserved amino acid or nucleotide residues as guides to find corresponding amino acid or nucleotide residues between and among human and non-human sequences. Corresponding positions also can be based on structural alignments, for example, by using computer simulated alignments of protein structure. In other instances, corresponding regions can be identified. One skilled in the art also can employ conserved amino acid residues as guides to find corresponding amino acid residues between and among human and non-human sequences.

[0401] As used herein, recitation that proteins are “compared under the same conditions” means that different proteins are treated identically or substantially identically such that any one or more conditions that can influence the activity or properties of a protein or agent are not varied or not substantially varied between the test agents. For example, when the activity of an antibody is compared to another antibody, any one or more conditions, such as the amount or concentration of the polypeptide; the presence, including amount, of excipients, carriers or other components in a formulation other than the active agent (e.g., antibody); temperature; pH; time of storage; storage vessel; properties of storage (e.g., agitation); and/or other conditions associated with exposure or use, are identical or substantially identical between and among the compared polypeptides/antibodies.

[0402] As used herein, an “adverse effect,” or “side effect,” or “adverse event,” or “adverse side effect,” refers to a harmful, deleterious and/or undesired effect associated with administering a therapeutic agent. Adverse side effects include, for example, serious infections, such as tuberculosis, and other infections caused by viruses, fungi, and bacteria, including upper respiratory infections, as well as dermatological and dermal toxicity, such as rash, headaches and nausea. Thus, “adverse effect” or “side effect” refers to a harmful, deleterious and/or undesired effect of administering a therapeutic agent. Side effects or adverse effects are graded on toxicity, and various toxicity scales exist, providing definitions for each grade. Examples of such scales are toxicity scales of the National Cancer Institute Common Toxicity Criteria version 2.0, and the World Health Organization or Common Terminology Criteria for Adverse Events (CTCAE) scale. Assigning grades of severity is within the skill of an experienced physician or other health care professional. The severity of symptoms can be quantified using the NCI Common Terminology Criteria for Adverse Events (CTCAE) grading system. The CTCAE is a descriptive terminology used for Adverse Event (AE) reporting. The grading (severity) scale is provided for each AE term. The CTCAE displays Grades 1 through 5, with clinical descriptions for severity for each adverse event based on the following general guideline: Grade 1 (Mild AE); Grade 2 (Moderate AE); Grade 3 (Severe AE); Grade 4 (Life-threatening or disabling AE); and Grade 5 (Death related to AE/fatal).

[0403] As used herein, a “property” of a polypeptide, such as an antibody, refers to any property exhibited by a polypeptide, including, but not limited to, binding specificity, structural configuration or conformation, protein stability, resistance to proteolysis, conformational stability, thermal tolerance, and tolerance to pH conditions. Changes in properties can alter an “activity” of the polypeptide. For example, a change in the binding specificity of the antibody polypeptide can alter the ability to bind an antigen, and/or various binding activities, such as affinity or avidity, or in vivo activities of the polypeptide.

[0404] As used herein, an “activity” or a “functional activity” of a polypeptide, such as an antibody, refers to any activity exhibited by the polypeptide. Such activities can be empirically determined. Exemplary activities include, but are not limited to, the ability to interact with a biomolecule, for example, through antigen-binding, DNA binding, ligand binding, or dimerization; and enzymatic activity, for example, kinase activity or proteolytic activity. For an antibody (including antibody fragments), activities include, but are not limited to, the ability to specifically bind a particular antigen, affinity of antigen-binding (e.g., high or low affinity), avidity of antigen-binding (e.g., high or low avidity), on-rate, off-rate, effector functions, such as the ability to promote antigen neutralization or clearance, virus neutralization, and in vivo activities, such as the ability to prevent infection or invasion of a pathogen, or to promote clearance, or to penetrate a particular tissue or fluid or cell in the body. Activity can be assessed in vitro or in vivo using recognized assays, such as ELISA, flow cytometry, surface plasmon resonance or equivalent assays to measure on- or off-rate, immunohistochemistry and immunofluorescence histology and microscopy, cell-based assays, flow cytometry, and binding assays (e.g., panning assays). For example, for an antibody polypeptide, activities can be assessed by measuring binding affinities, avidities, and/or binding coefficients (e.g., for on-/off-rates), and other activities in vitro, or by measuring various effects in vivo, such as immune effects, e.g., antigen clearance; penetration or localization of the antibody into tissues; protection from disease, e.g., infection; serum or other fluid antibody titers; or other assays that are well-known in the art. The results of such assays that indicate that a polypeptide exhibits an activity can be correlated to activity of the polypeptide in vivo, in which in vivo activity can be referred to as therapeutic activity, or biological activity. Activity of a modified polypeptide can be any level of percentage of activity of the unmodified polypeptide, including but not limited to, 1% of the activity, 2%, 3%, 4%, 5%, 10%, 20%, 30%, 40%, 50%, 60%, 70%, 80%, 90%, 91%, 92%, 93%, 94%, 95%, 96%, 97%, 98%, 99%, 100%, 200%, 300%, 400%, 500%, or more, of activity compared to the unmodified polypeptide. Assays to determine functionality or activity of modified (or variant) antibodies are well-known in the art.

[0405] As used herein, “bind,” “bound,” and grammatical variations thereof, refers to the participation of a molecule in any attractive interaction with another molecule, resulting in a stable association in which the two molecules are in close proximity to one another. Binding interactions include, but are not limited to, non-covalent bonds, covalent bonds (such as reversible and irreversible covalent bonds), and includes interactions between molecules, such as, but not limited to, proteins, nucleic acids, carbohydrates, lipids, and small molecules, such as chemical compounds, including drugs. Exemplary bonds are antibody-antigen interactions and receptor-ligand interactions. When an antibody “binds” a particular antigen, “bind” refers to the specific recognition of the antigen by the antibody, through cognate antibody-antigen interaction, at antibody combining sites. Binding also can include the association of multiple chains of a polypeptide, such as antibody chains, which interact through disulfide bonds.

[0406] As used herein, “binding activity” refers to characteristics of a molecule, e.g., a polypeptide, relating to whether or not, and how, it binds one or more binding partners. Binding activities include the ability to bind the binding partner(s), the affinity with which it binds to the binding partner (e.g., high affinity), the avidity with which it binds to the binding partner, the strength of the bond with the binding partner, and/or the specificity for binding with the binding partner.

[0407] As used herein, “affinity” or “binding affinity” describes the strength of the interaction between two or more molecules, such as binding partners, and typically, the strength of the noncovalent interactions between two binding partners. The affinity of an antibody or antigen-binding fragment thereof for an antigen epitope is the measure of the strength of the total noncovalent interactions between a single antibody combining site and the epitope. Low-affinity antibody-antigen interaction is weak, and the molecules tend to dissociate rapidly, while high affinity antibody-antigen binding is strong and the molecules remain bound for a longer amount of time. Binding affinity can be determined in terms of binding kinetics, such as by measuring rates of association (ka or kon) and/or dissociation (kd or koff), half maximal effective concentration (EC50) values, and/or thermodynamic data (e.g., Gibbs free energy (ΔG), enthalpy (ΔH), entropy (−TΔS), and/or calculating association (Ka) or dissociation (Kd) constants. EC50, also called the apparent Kd, is the concentration (e.g., ng/mL) of antibody, where 50% of the maximal binding is observed to a fixed amount of antigen. Typically, EC50 values are determined from sigmoidal dose-response curves, where the EC50 is the concentration at the inflection point. A high antibody affinity for its substrate correlates with a low EC50 value, and a low affinity corresponds to a high EC50 value. Affinity constants can be determined by standard kinetic methodology for antibody reactions, for example, immunoassays, such as ELISA, followed by curve-fitting analysis.

[0408] As used herein, “affinity constant” refers to an association constant (Ka) used to measure the affinity of an antibody for an antigen. The higher the affinity constant, the greater the affinity of the antibody for the antigen. Affinity constants are expressed in units of reciprocal molarity (i.e., M−1), and can be calculated from the rate constant for the association-dissociation reaction, as measured by standard kinetic methodology for antibody reactions (e.g., immunoassays, surface plasmon resonance, or other kinetic interaction assays known in the art). The binding affinity of an antibody also can be expressed as a dissociation constant, or Kd. The dissociation constant is the reciprocal of the association constant, i.e., Kd=1/Ka. Hence, an affinity constant also can be represented by the Kd. Affinity constants can be determined by standard kinetic methodology for antibody reactions, for example, immunoassays, surface plasmon resonance (SPR) (see, e.g., Rich and Myszka (2000) Curr. Opin. Biotechnol 11:54; Englebienne (1998) Analyst. 123:1599), isothermal titration calorimetry (ITC) or other kinetic interaction assays known in the art (see, e.g., Paul, ed., Fundamental Immunology, 2nd ed., Raven Press, New York, pages 332-336 (1989); see also, U.S. Pat. No. 7,229,619, for a description of exemplary SPR and ITC methods for calculating the binding affinity of antibodies). Instrumentation and methods for real time detection and monitoring of binding rates are known and are commercially available (e.g., BIAcore 2000, BIAcore AB, Upsala, Sweden and GE Healthcare Life Sciences; Malmqvist (2000) Biochem. Soc. Trans. 27:335).

[0409] Methods for calculating affinity are well-known, such as methods for determining EC50 values, or methods for determining association/dissociation constants. For example, in terms of EC50, high binding affinity means that the antibody specifically binds to a target protein with an EC50 that is less than about 10 ng/mL, 9 ng/mL, 8 ng/mL, 7 ng/mL, 6 ng/mL, 5 ng/mL, 3 ng/mL, 2 ng/mL, 1 ng/mL or less. High binding affinity also can be characterized by an equilibrium dissociation constant (Kd) of 10−6 M or lower, such as 10−7 M, 10−8 M, 10−9 M, 10−10 M, 10−11 M, or 10−12 M, or lower. In terms of equilibrium association constant (Ka), high binding affinity is generally associated with Ka values of greater than or equal to about 106 M−1, greater than or equal to about 107 M−1, greater than or equal to about 108 M−1, or greater than or equal to about 109 M−1, 1010 M−1, 1011 M−1, or 1012 M−1. Affinity can be estimated empirically, or affinities can be determined comparatively, e.g., by comparing the affinity of two or more antibodies for a particular antigen, for example, by calculating pairwise ratios of the affinities of the antibodies tested. For example, such affinities can be readily determined using conventional techniques, such as by ELISA; equilibrium dialysis; surface plasmon resonance; by radioimmunoassay using a radiolabeled target antigen; or by another method known to the skilled artisan. The affinity data can be analyzed, for example, by the method of Scatchard et al., (1949) Ann N.Y. Acad. Sci., 51:660, or by curve fitting analysis, for example, using a 4 Parameter Logistic nonlinear regression model using the equation: y=((A−D)/(1+((x/C)\hat{ }B)))+D, where A is the minimum asymptote, B is the slope factor, C is the inflection point (EC50), and D is the maximum asymptote.

[0410] As used herein, “antibody avidity” refers to the strength of multiple interactions between a multivalent antibody and its cognate antigen, such as with antibodies containing multiple binding sites associated with an antigen with repeating epitopes or an epitope array. A high avidity antibody has a higher strength of such interactions compared to a low avidity antibody.

[0411] As used herein, “specificity for a target,” such as a CSR, refers to a preference, higher binding affinity, for binding to the target compared to a non-target. Selective binding refers to binding to a target with an affinity, generally, of at least about 10⁷-10⁸ M−1. It also can refer to relative activity in which the affinity of a moiety or molecule for one target molecule is compared to the affinity for another molecule, and if the difference is of a certain magnitude, such as about 10-fold, the moiety or molecule is said to have greater specificity for the first target relative to the second.

[0412] As used herein, “specifically binds” or “immunospecifically binds,” with respect to an antibody or antigen-binding fragment thereof, are used interchangeably herein and refer to the ability of the antibody or antigen-binding fragment to form one or more noncovalent bonds with a cognate antigen, by noncovalent interactions between the antibody combining site(s) of the antibody and the antigen. Typically, an antibody that immunospecifically binds (or that specifically binds), for example, a CSR is one that binds with an affinity constant (Ka) of about or 1×10⁷ M−1 or 1×10⁸ M−1 or greater (or a dissociation constant (Kd) of 1×10⁻⁷ M or 1×10⁻⁸ M or less). Antibodies or antigen-binding fragments that immunospecifically bind to a particular antigen can be identified, for example, by immunoassays, such as radioimmunoassays (RIA), enzyme-linked immunosorbent assays (ELISAs), surface plasmon resonance (SPR), or other techniques known to those of skill in the art.

[0413] As used herein, “steric effects” refer to the effects of the size of atoms or groups on the molecule. Steric effects include, but are not limited to, steric hindrance and Van Der Waals repulsion. Steric effects are the effects resulting from the fact that atoms occupy space; when atoms are put close to each other, this costs energy, as the electrons near the atoms repel each other.

[0414] As used herein, “exhibits at least one activity” or “retains at least one activity” refers to the activity exhibited by an antibody polypeptide, such as a variant antibody or other therapeutic polypeptide, compared to the target or unmodified polypeptide, that does not contain the modification. A modified, or variant, polypeptide that retains an activity of a target polypeptide can exhibit improved activity, decreased activity, or can maintain the activity of the unmodified polypeptide. In some instances, a modified, or variant, polypeptide can retain an activity that is increased compared to a target or unmodified polypeptide. In some cases, a modified, or variant, polypeptide can retain an activity that is decreased compared to an unmodified or target polypeptide. Activity of a modified, or variant, polypeptide can be any level of percentage of activity of the unmodified or target polypeptide, including but not limited to, 1% of the activity, 2%, 3%, 4%, 5%, 10%, 20%, 30%0, 40%, 50%, 60%, 70%, 80%, 90%, 91%, 92%, 93%, 94%, 95%, 96%, 97%, 98%, 99%, 100%, 200%, 300%, 400%, 500%, or more activity, compared to the unmodified or target polypeptide. In other embodiments, the change in activity is at least about 2 times, 3 times, 4 times, 5 times, 6 times, 7 times, 8 times, 9 times, 10 times, 20 times, 30 times, 40 times, 50 times, 60 times, 70 times, 80 times, 90 times, 100 times, 200 times, 300 times, 400 times, 500 times, 600 times, 700 times, 800 times, 900 times, 1000 times, or more times, greater than the unmodified or target polypeptide. Assays for retention of an activity depend on the activity to be retained. Such assays can be performed in vitro or in vivo. Activity can be measured, for example, using assays known in the art and described below for activities, such as, but not limited to, ELISA and panning assays. Activities of a modified, or variant, polypeptide compared to an unmodified or target polypeptide also can be assessed in terms of an in vivo therapeutic or biological activity or result following administration of the polypeptide.

[0415] As used herein, “antibody” refers to immunoglobulins and immunoglobulin fragments, whether natural, or partially or wholly synthetically, such as recombinantly, produced, including any fragment thereof containing at least a portion of the variable heavy chain and/or variable light chain regions of the immunoglobulin molecule that is sufficient to form an antigen-binding site and, when assembled, to specifically bind an antigen. Hence, an antibody includes any protein having a binding domain that is homologous or substantially homologous to an immunoglobulin antigen-binding domain (antibody combining site). For example, an antibody refers to an antibody that contains two heavy chains (which can be denoted H and H′) and two light chains (which can be denoted L and L′), where each heavy chain can be a full-length immunoglobulin heavy chain or a portion thereof sufficient to form an antigen-binding site (e.g., heavy chains include, but are not limited to, VH chains, VH-CH1 chains, and VH-CH1-CH2-CH3 chains), and each light chain can be a full-length light chain or a portion thereof sufficient to form an antigen-binding site (e.g., light chains include, but are not limited to, VL chains and VL-CL chains). Each heavy chain (H and H′) pairs with one light chain (L and L′, respectively). Typically, antibodies minimally include all or at least a portion of the variable heavy (VH) chain and/or the variable light (VL) chain. An antibody also can include other regions, such as, for example, all or a portion of the constant region, and/or all or a portion (sufficient to provide flexibility) of the hinge region.

[0416] For purposes herein, the term “antibody,” unless otherwise specified, includes full-length antibodies and portions thereof, including antibody fragments. Antibody fragments, include, but are not limited to, for example, Fab fragments, Fab′ fragments, F(ab′)2 fragments, Fv fragments, disulfide-linked Fvs (dsFv), Fd fragments, Fd′ fragments, single-chain Fvs (scFvs), single-chain Fabs (scFab), hsFv (helix-stabilized Fv), single domain antibodies (dAbs, or sdAbs), minibodies, diabodies, anti-idiotypic (anti-Id) antibodies, nanobodies and camelid antibodies, free light chains, VHH antibodies (or nanobodies), or antigen-binding fragments of any of the above. Antibody fragments also can include combinations of any of the above fragments, such as, for example, tandem scFv, Fab-scFv (HC C-term, or LC C-term), Fab-(scFv)2 (C-term), scFv-Fab-scFv, Fab-CH2-scFv, scFv fusions (C term, or N term), Fab-fusions (HC C-term, or LC C-term), scFv-scFv-dAb, scFv-dAb-scFv, dAb-scFv-scFv, and tribodies. The term “antibody” includes synthetic antibodies, recombinantly produced antibodies, multi-specific and heteroconjugate antibodies (e.g., bi-, tri- and quad-specific antibodies, diabodies, triabodies and tetrabodies), human antibodies, non-human antibodies, humanized antibodies, chimeric antibodies, and intrabodies. Antibodies provided herein include members of any immunoglobulin class (e.g., IgG, IgM, IgD, IgE, IgA and IgY), any subclass (e.g., IgG1, IgG2, IgG3, IgG4, IgA1 and IgA2) or sub-subclass (e.g., IgG2a and IgG2b).

[0417] As used herein, a “form of an antibody” refers to a particular structure of an antibody. Antibodies herein include full-length antibodies and portions thereof, such as, for example, a Fab fragment or other antibody fragment. Thus, a Fab is a particular form of an antibody.

[0418] As used herein, reference to a “corresponding form” of an antibody means that, when comparing a property or activity of two antibodies, the property is compared using the same form of the antibody. For example, if it is stated that an antibody has less activity compared to the activity of the corresponding form of a first antibody, that means that a particular form, such as a Fab of that antibody, has less activity compared to the Fab form of the first antibody.

[0419] As used herein, a full-length antibody is an antibody having two full-length heavy chains (e.g., VH-CH1-CH2-CH3, or VH-CH1-CH2-CH3-CH4), two full-length light chains (VL-CL), and hinge regions, such as human antibodies produced by antibody secreting B cells, and antibodies with the same domains that are produced synthetically.

[0420] As used herein, a “multi-specific construct” refers to a construct, such as an antibody or construct comprising portions of an antibody, that exhibits affinity for more than one target antigen so that it can specifically interact with the targets. Multi-specific constructs herein can have structures similar to full immunoglobulin molecules and include Fc regions, for example IgG Fc regions, and antigen-binding regions.

[0421] As used herein, a “bispecific construct” refers to a multi-specific construct that has binding specificity for two different antigens. Bispecific constructs include, for example, monoclonal antibodies or antigen-binding fragments thereof linked to a polypeptide region, such as Fc or modified Fc, that modifies the activity of the construct. For human therapeutics, the constructs are derived from human sources or are derived from a human source or are humanized, and the constructs have binding specificities for at least two different antigens. A bispecific antibody or construct includes antibodies and antigen-binding fragment thereof that includes two separate antigen-binding domains (e.g., two scFvs, or two dAbs, or two Fabs, joined by a linker). The antigen-binding domains can bind to the same antigen or different antigens.

[0422] As used herein, “antibody fragment” or “antibody portion” refers to any portion of a full-length antibody that is less than full-length, but contains at least a portion of the variable region(s) of the antibody sufficient to form an antigen-binding site (e.g., one or more complementarity-determining region (CDRs)), and thus, retains the binding specificity and/or an activity of the full-length antibody; antibody fragments include antibody derivatives produced by enzymatic treatment of full-length antibodies, as well as synthetically, e.g., recombinantly, produced derivatives. Examples of antibody fragments include, but are not limited to, Fab, Fab′, F(ab)2, single-chain Fvs (scFvs), Fv, dsFv, diabody, triabody, affibody, nanobody, aptamer, dAb, Fd and Fd fragments (see, for example, Methods in Molecular Biology, Vol 207: Recombinant Antibodies for Cancer Therapy Methods and Protocols (2003); Chapter 1; pp. 3-25, Kipriyanov). The fragment can include multiple chains linked together, such as by disulfide bridges, and/or by peptide linkers. An antibody fragment generally contains at least about 50 amino acids, such as at about or at least 100 amino acids, and typically, at least about or at least 110, 120, 150, 170, 180, or 200 amino acids.

[0423] As used herein, an “Fv antibody fragment” is composed of one variable heavy domain (VH) and one variable light (VL) domain, linked by noncovalent interactions.

[0424] As used herein, a dsFv (disulfide-linked Fv) refers to an Fv with an engineered intermolecular disulfide bond, which stabilizes the VH-VL pair.

[0425] As used herein, an “scFv fragment” refers to an antibody fragment that contains a variable light chain (VL) and variable heavy chain (VH), covalently connected by a polypeptide linker in any order. The linker is of a length, such that the two variable domains are bridged without substantial interference. Exemplary linkers are (Gly-Ser)ₙ residues with some Glu or Lys residues dispersed throughout to increase solubility.

[0426] As used herein, “diabodies” are dimeric scFv; diabodies typically have shorter peptide linkers than scFvs, and preferentially dimerize.

[0427] As used herein, “triabodies” are trimeric scFv; they contain three peptide chains, each of which contains one VH domain and one VL domain joined by a short linker (e.g., a linker composed of 1-2 amino acids) to permit intramolecular association of VH and VL domains within the same peptide chain; triabodies typically trimerize.

[0428] As used herein, a “Fab fragment” is an antibody fragment that results from digestion of a full-length immunoglobulin with papain, or a fragment having the same structure that is produced synthetically, e.g., by recombinant methods. A Fab fragment contains a light chain (containing a VL and CL), and another chain containing a variable domain of a heavy chain (VH) and one constant region domain of the heavy chain (CH1).

[0429] As used herein, a “F(ab′)2 fragment” is an antibody fragment that results from digestion of an immunoglobulin with pepsin at pH 4.0-4.5, or a fragment having the same structure that is produced synthetically, e.g., by recombinant methods. The F(ab′)2 fragment essentially contains two Fab fragments, where each heavy chain portion contains an additional few amino acids, such as, for example, all or a portion, sufficient to provide flexibility, of the hinge region, including cysteine residues that form disulfide linkages joining the two fragments.

[0430] As used herein, a Fab′ fragment is a fragment containing one half (i.e., one heavy chain and one light chain) of the F(ab′)2 fragment.

[0431] As used herein, an Fd fragment is a fragment of an antibody containing a variable domain (VH) and one constant region domain (CH1) of an antibody heavy chain.

[0432] As used herein, an Fd′ fragment is a fragment of an antibody containing one heavy chain portion of a F(ab′)2 fragment.

[0433] As used herein, an Fv′ fragment is a fragment containing only the VH and VL domains of an antibody molecule.

[0434] As used herein, hsFv (helix-stabilized Fv) refers to an antibody fragment in which the constant domains normally present in a Fab fragment have been substituted with a heterodimeric coiled-coil domain (see, e.g., Arndt et al. (2001) J. Mol. Biol. 7:312:221-228).

[0435] As used herein, a “domain antibody,” “single domain antibody,” “sdAb,” or “dAb,” used interchangeably, refers to a monomeric small antibody fragment that contains a variable domain of the heavy chain (VH) or of the light chain (VL) of an antibody. dAbs are the smallest antigen-binding fragments of antibodies; they are about approximately 11-15 kDa in size (about 100-150 amino acids), which is approximately one-tenth the size of a full monoclonal antibody (mAb). There are three complementarity determining regions (CDRs) on each VH and each VL. Each dAb contains three out of the six CDRs, which are the highly diversified loop regions that bind to the target antigen, from a VH-VL pair in an antibody.

[0436] As used herein, a camelid antibody, also referred to as a nanobody or VHHs, lacks a light chain and is composed of two identical heavy chains. They occur naturally in camelids, such as camels and alpacas.

[0437] As used herein, a polypeptide “domain” is a part of a polypeptide (a sequence of 3 or more, generally 5, 10, or more, amino acids) that is structurally and/or functionally distinguishable or definable. An exemplary polypeptide domain is a part of the polypeptide that can form an independently folded structure within a polypeptide made up of one or more structural motifs (e.g., combinations of alpha helices and/or beta strands connected by loop regions), and/or that is recognized by a particular functional activity, such as enzymatic activity, dimerization, or antigen-binding. A polypeptide can have one or more, typically more than one, distinct domains. For example, the polypeptide can have one or more structural domains and one or more functional domains. A single polypeptide domain can be distinguished based on structure and function. A domain can encompass a contiguous linear sequence of amino acids. Alternatively, a domain can encompass a plurality of non-contiguous amino acid portions, which are non-contiguous along the linear sequence of amino acids of the polypeptide. Typically, a polypeptide contains a plurality of domains. For example, each heavy chain and each light chain of an antibody molecule contains a plurality of immunoglobulin (Ig) domains, each about 110 amino acids in length. Those of skill in the art are familiar with polypeptide domains and can identify them by virtue of structural and/or functional homology with other such domains. For exemplification herein, definitions are provided, but it is understood that it is well within the skill in the art to recognize particular domains by name. If needed, appropriate software can be employed to identify domains.

[0438] As used herein, a “functional region” of a polypeptide is a region of the polypeptide that contains at least one functional domain (which imparts a particular function, such as an ability to interact with a biomolecule, for example, through antigen-binding, DNA binding, ligand binding, or dimerization, or by enzymatic activity, for example, kinase activity or proteolytic activity); exemplary functional regions of polypeptides are antibody domains, such as VH, VL, CH, CL, and portions thereof, such as CDRs, including CDR1, CDR2 and CDR3, or antigen-binding portions, such as antibody combining sites.

[0439] As used herein, a “structural region” of a polypeptide is a region of the polypeptide that contains at least one structural domain.

[0440] As used herein, an “Ig domain” is a domain, recognized as such by those in the art, that is distinguished by a structure, called the Immunoglobulin (Ig) fold, which contains two beta-pleated sheets, each containing anti-parallel beta strands of amino acids connected by loops. The two beta sheets in the Ig fold are sandwiched together by hydrophobic interactions and a conserved intra-chain disulfide bond. Individual immunoglobulin domains within an antibody chain further can be distinguished based on function. For example, a light chain contains one variable region domain (VL) and one constant region domain (CL), while a heavy chain contains one variable region domain (VH) and three or four constant region domains (CH). Each VL, CL, VH, and CH domain is an example of an immunoglobulin domain.

[0441] As used herein, a “variable domain,” with reference to an antibody, is a specific immunoglobulin (Ig) domain of an antibody heavy or light chain that contains a sequence of amino acids that varies among different antibodies. Each light chain and each heavy chain has one variable region domain (VL and VH, respectively). The variable domains provide antigen specificity, and thus, are responsible for antigen recognition. Each variable region contains complementarity-determining regions (CDRs) that are part of the antigen-binding site domain and framework regions (FRs).

[0442] As used herein, “hypervariable region,” “HV,” “complementarity-determining region,” “CDR” and “antibody CDR” are used interchangeably to refer to one of a plurality of portions within each variable region that together form an antigen-binding site of an antibody. Each variable region domain contains three CDRs, named CDR1, CDR2, and CDR3. The three CDRs are non-contiguous along the linear amino acid sequence, but are proximate in the folded polypeptide. The CDRs are located within the loops that join the parallel strands of the beta sheets of the variable domain.

[0443] As used herein, “antigen-binding domain,” “antigen-binding site,” “antigen-binding fragment,” “antigen combining site” and “antibody combining site” are used synonymously to refer to a domain within an antibody that recognizes and physically interacts with the cognate antigen. A native conventional full-length antibody molecule has two conventional antigen-binding sites, each containing portions of a heavy chain variable region and portions of a light chain variable region. A conventional antigen-binding site contains the loops that connect the anti-parallel beta strands within the variable region domains. The antigen combining sites can contain other portions of the variable region domains. Each conventional antigen-binding site contains three hypervariable regions from the heavy chain and three hypervariable regions from the light chain. The hypervariable regions also are called complementarity-determining regions (CDRs).

[0444] As used herein, “portion thereof,” with reference to an antibody heavy or light chain, or variable heavy or light chain, refers to a contiguous portion thereof that is sufficient to form an antigen-binding site such that, when assembled into an antibody containing a heavy and light chain, it contains at least 1 or 2, typically 3, 4, 5 or all 6 CDRs of the variable heavy (VH) and variable light (VL) chains sufficient to retain at least a portion of the binding specificity of the corresponding full-length antibody containing all 6 CDRs. Generally, a sufficient antigen-binding site requires the CDR3 of the heavy chain (CDRH3). It typically further requires the CDR3 of the light chain (CDRL3). As described herein, one of skill in the art knows and can identify the CDRs based on Kabat or Chothia numbering (see e.g., Kabat, E. A. et al. (1991) Sequences of Proteins of Immunological Interest, Fifth Edition, U.S. Department of Health and Human Services, NIH Publication No. 91-3242; and Chothia, C. et al. (1987) J Mol. Biol. 196:901-917).

[0445] As used herein, “framework regions” or “FRs” are the domains within the antibody variable region domains that are located within the beta sheets; the FR regions are comparatively more conserved, in terms of their amino acid sequences, than the hypervariable regions. Each variable region contains four framework regions that separate the three hypervariable regions.

[0446] As used herein, a “constant region” domain is a domain in an antibody heavy or light chain that contains a sequence of amino acids that is comparatively more conserved among antibodies than the variable region domain. Each light chain has a single light chain constant region (CL) domain, and each heavy chain contains one or more heavy chain constant region (CH) domains, which include, CH1, CH2, CH3 and CH4. Full-length IgA, IgD and IgG isotypes contain CH1, CH2 and CH3 domains and a hinge region, while IgE and IgM contain CH1, CH2, CH3 and CH4 domains. CH1 and CL domains extend the Fab arm of the antibody molecule, thus contributing to the interaction with the antigen and rotation of the antibody arms. Antibody constant regions can serve effector functions, such as, but not limited to, clearance of antigens, pathogens, and toxins to which the antibody specifically binds, e.g., through interactions with various cells, biomolecules, and tissues.

[0447] As used herein, an “antibody hinge region” or “hinge region” refers to a polypeptide region in the heavy chain of the gamma, delta, and alpha antibody isotypes, that occurs between the CH1 and CH2 domains, joins the Fab and Fc regions, and has no homology with the other antibody domains. This region is rich in proline residues and provides flexibility to IgG, IgD and IgA antibodies, allowing the two “arms” (each containing one antibody combining site) of the Fab portion to be mobile, assuming various angles with respect to one another as they bind an antigen. This flexibility allows the Fab arms to move in order to align the antibody combining sites to interact with epitopes on cell surfaces or other antigens. Two interchain disulfide bonds within the hinge region stabilize the interaction between the two heavy chains. In some embodiments provided herein, the synthetically produced antibody fragments contain one or more hinge regions, for example, to promote stability via interactions between two antibody chains. Hinge regions are examples parts of dimerization domains, and, for purposes herein are part of the linkers.

[0448] As used herein, a “fragment crystallizable region” or “Fc” or “Fc region” or “Fc domain” refers to a polypeptide containing the constant region of an antibody heavy chain, excluding the first constant region immunoglobulin domain. Fc refers to the last two constant region immunoglobulin domains of IgA, IgD, and IgG (CH2 and CH3, also referred to as C72 and C73), or the last three constant region immunoglobulin domains of IgE and IgM (CH2, CH3 and CH4). Optionally, an Fc domain can include all or part of the flexible hinge region, which is N-terminal to these domains. For IgA and IgM, the Fc can include the J chain. For an exemplary Fc domain of IgG, Fc contains immunoglobulin domains CH2 and CH3, and optionally, all or part of the hinge between CH1 and CH2 (also referred to as C71 and C72). The boundaries of the Fc region can vary, but typically, include at least part of the hinge region. For purposes herein, Fc also includes any allelic or species variant, or any variant or modified form, such as any variant or modified form of Fc that has altered binding to an Fc receptor (FcR) or alters an Fc-mediated effector function. Mutations in the Fc region and their effects are well-documented in the art.

[0449] “Fc” or “Fc region” or “Fc domain” refers to a polypeptide containing the constant region of an antibody heavy chain, excluding the first constant region immunoglobulin domain. Thus, Fc refers to the last two constant region immunoglobulin domains of IgA, IgD, and IgE, or the last three constant region immunoglobulin domains of IgE and IgM. Optionally, an Fc domain can include all or part of the flexible hinge N-terminal to these domains. For IgA and IgM, Fc can include the J chain. For an exemplary Fc domain of IgG, Fc contains immunoglobulin domains Cγ2 and Cγ3, and optionally all or part of the hinge between Cγ1 and Cγ2. The boundaries of the Fc region can vary, but typically, include at least part of the hinge region. An exemplary sequences of IgG Fc domain is set forth in SEQ ID NO:167. In addition, Fc also includes any allelic or species variant or any variant or modified form, such as any variant or modified form that alters the binding to an FcR or alters an Fc-mediated effector function. Exemplary sequences of other Fc domains, including modified Fc domains, are set forth in SEQ ID NOs: 168 or 169.

[0450] As used herein, “Fc chimera” refers to a chimeric polypeptide in which one or more polypeptides is/are linked, directly or indirectly, to an Fc region or a derivative thereof. Typically, an Fc chimera combines the Fc region of an immunoglobulin with another polypeptide. Derivatives of, or modified Fc polypeptides, are known to those of skill in the art.

[0451] As used herein, “Kabat numbering” refers to the index numbering of the IgG1 Kabat antibody (see e.g., Kabat, E. A. et al. (1991) Sequences of Proteins of Immunological Interest, Fifth Edition, U.S. Department of Health and Human Services, NIH Publication No. 91-3242); it permits easy comparison among antibodies, similarly to the way chymotrypsin numbering permits comparison among proteases. One of skill in the art can identify regions of the constant region using Kabat numbering.

[0452] As used herein, “EU numbering” or “EU index” refer to the numbering scheme of the EU antibody described in Edelman et al., (1969) Proc. Natl. Acad. Sci. USA 63:78-85. “EU index as in Kabat” refers to EU index numbering of the human IgG1 Kabat antibody as set forth in Kabat, E. A. et al. (1991) Sequences of Proteins of Immunological Interest, Fifth Edition, U.S. Department of Health and Human Services, NIH Publication No. 91-3242. EU numbering, or EU numbering as in Kabat, are frequently used by those of skill in the art to number amino acid residues of the Fc regions of the light and heavy antibody chains. For example, one of skill in the art can identify regions of the constant region using EU numbering. For example, the CL domain of the Ig kappa light chain corresponds to residues R108-C214 according to Kabat and EU numbering (see, e.g., Table 3 below). The CH1 domain of IgG1 corresponds to residues 118-215 (EU numbering) or 114-223 (Kabat numbering); CH2 corresponds to residues 231-340 (EU numbering) or 244-360 (Kabat numbering); CH3 corresponds to residues 341-447 (EU numbering) or 361-478 (Kabat numbering).

[0453] The following tables define the numbering for the IgG1 and IgG4 heavy chain constant domains, and the Ig kappa light constant domain, by EU, Kabat, and sequential numbering. Table 3 shows the IgG1 heavy chain constant domain by EU, Kabat and sequential numbering, where sequential numbering is with respect to the sequence of amino acids set forth in SEQ ID NO:9, and identifies residues within the CH1, CH2 and CH3 domains, as well as the hinge region. Table 2 shows the immunoglobulin (Ig) kappa light chain constant domain by EU, Kabat and sequential numbering, where sequential numbering is with respect to the sequence of amino acids set forth in SEQ ID NO:17. In Table 4, the top row (bold) sets forth the amino acid residue number by sequential numbering (with reference to SEQ ID NO:17); the second row (bold) provides the 1-letter code for the amino acid residue at the position indicated by the number in the top row; the third row (in italics) indicates the corresponding Kabat number according to Kabat numbering; and the fourth row indicates the corresponding EU index number according to EU numbering. The table below shows the IgG4 heavy chain constant domain by EU, Kabat and sequential numbering, where sequential numbering is with respect to the sequence of amino acids set forth in SEQ ID NO:15, and identifies residues within the CH1, CH2 and CH3 domains, as well as the hinge region.

TABLE 3
IgG1 Heavy Chain Constant Domain by
EU, Kabat and Sequential Numbering

Residue Numbering

| | EU | | Sequential | IgG1 |
|---|---|---|---|---|
| Domain | Index | Kabat | (SEQ ID NO: 9) | Sequence |
| CH1 | 118 | 114 | 1 | A |
| CH1 | 119 | 115 | 2 | S |
| CH1 | 120 | 116 | 3 | T |
| CH1 | 121 | 117 | 4 | K |
| CH1 | 122 | 118 | 5 | G |
| CH1 | 123 | 119 | 6 | P |
| CH1 | 124 | 120 | 7 | S |
| CH1 | 125 | 121 | 8 | V |
| CH1 | 126 | 122 | 9 | F |
| CH1 | 127 | 123 | 10 | P |
| CH1 | 128 | 124 | 11 | L |
| CH1 | 129 | 125 | 12 | A |
| CH1 | 130 | 126 | 13 | P |
| CH1 | 131 | 127 | 14 | S |
| CH1 | 132 | 128 | 15 | S |
| CH1 | 133 | 129 | 16 | K |
| CH1 | 134 | 130 | 17 | S |
| CH1 | 135 | 133 | 18 | T |
| CH1 | 136 | 134 | 19 | S |
| CH1 | 137 | 135 | 20 | G |
| CH1 | 138 | 136 | 21 | G |
| CH1 | 139 | 137 | 22 | T |
| CH1 | 140 | 138 | 23 | A |
| CH1 | 141 | 139 | 24 | A |
| CH1 | 142 | 140 | 25 | L |
| CH1 | 143 | 141 | 26 | G |
| CH1 | 144 | 142 | 27 | C |
| CH1 | 145 | 143 | 28 | L |
| CH1 | 146 | 144 | 29 | V |
| CH1 | 147 | 145 | 30 | K |
| CH1 | 148 | 146 | 31 | D |
| CH1 | 149 | 147 | 32 | Y |
| CH1 | 150 | 148 | 33 | F |
| CH1 | 151 | 149 | 34 | P |
| CH1 | 152 | 150 | 35 | E |
| CH1 | 153 | 151 | 36 | P |
| CH1 | 154 | 152 | 37 | V |
| CH1 | 155 | 153 | 38 | T |
| CH1 | 156 | 154 | 39 | V |
| CH1 | 157 | 156 | 40 | S |
| CH1 | 158 | 157 | 41 | W |
| CH1 | 159 | 162 | 42 | N |
| CH1 | 160 | 163 | 43 | S |
| CH1 | 161 | 164 | 44 | G |
| CH1 | 162 | 165 | 45 | A |
| CH1 | 163 | 166 | 46 | L |
| CH1 | 164 | 167 | 47 | T |
| CH1 | 165 | 168 | 48 | S |
| CH1 | 166 | 169 | 49 | G |
| CH1 | 167 | 171 | 50 | V |
| CH1 | 168 | 172 | 51 | H |
| CH1 | 169 | 173 | 52 | T |
| CH1 | 170 | 174 | 53 | F |
| CH1 | 171 | 175 | 54 | P |
| CH1 | 172 | 176 | 55 | A |
| CH1 | 173 | 177 | 56 | V |
| CH1 | 174 | 178 | 57 | L |
| CH1 | 175 | 179 | 58 | Q |
| CH1 | 176 | 180 | 59 | S |
| CH1 | 177 | 182 | 60 | S |
| CH1 | 178 | 183 | 61 | G |
| CH1 | 179 | 184 | 62 | L |
| CH1 | 180 | 185 | 63 | Y |
| CH1 | 181 | 186 | 64 | S |
| CH1 | 182 | 187 | 65 | L |
| CH1 | 183 | 188 | 66 | S |
| CH1 | 184 | 189 | 67 | S |
| CH1 | 185 | 190 | 68 | V |
| CH1 | 186 | 191 | 69 | V |
| CH1 | 187 | 192 | 70 | T |
| CH1 | 188 | 193 | 71 | V |
| CH1 | 189 | 194 | 72 | P |
| CH1 | 190 | 195 | 73 | S |
| CH1 | 191 | 196 | 74 | S |
| CH1 | 192 | 197 | 75 | S |
| CH1 | 193 | 198 | 76 | L |
| CH1 | 194 | 199 | 77 | G |
| CH1 | 195 | 200 | 78 | T |
| CH1 | 196 | 203 | 79 | Q |
| CH1 | 197 | 205 | 80 | T |
| CH1 | 198 | 206 | 81 | Y |
| CH1 | 199 | 207 | 82 | I |
| CH1 | 200 | 208 | 83 | C |
| CH1 | 201 | 209 | 84 | N |
| CH1 | 202 | 210 | 85 | V |
| CH1 | 203 | 211 | 86 | N |
| CH1 | 204 | 212 | 87 | H |
| CH1 | 205 | 213 | 88 | K |
| CH1 | 206 | 214 | 89 | P |
| CH1 | 207 | 215 | 90 | S |
| CH1 | 208 | 216 | 91 | N |
| CH1 | 209 | 217 | 92 | T |
| CH1 | 210 | 218 | 93 | K |
| CH1 | 211 | 219 | 94 | V |
| CH1 | 212 | 220 | 95 | D |
| CH1 | 213 | 221 | 96 | K |
| CH1 | 214 | 222 | 97 | K |
| CH1 | 215 | 223 | 98 | V |
| Hinge | 216 | 226 | 99 | E |
| Hinge | 217 | 227 | 100 | P |
| Hinge | 218 | 228 | 101 | K |
| Hinge | 219 | 232 | 102 | S |
| Hinge | 220 | 233 | 103 | C |
| Hinge | 221 | 234 | 104 | D |
| Hinge | 222 | 235 | 105 | K |
| Hinge | 223 | 236 | 106 | T |
| Hinge | 224 | 237 | 107 | H |
| Hinge | 225 | 238 | 108 | T |
| Hinge | 226 | 239 | 109 | C |
| Hinge | 227 | 240 | 110 | P |
| Hinge | 228 | 241 | 111 | P |
| Hinge | 229 | 242 | 112 | C |
| Hinge | 230 | 243 | 113 | P |
| CH2 | 231 | 244 | 114 | A |
| CH2 | 232 | 245 | 115 | P |
| CH2 | 233 | 246 | 116 | E |
| CH2 | 234 | 247 | 117 | L |
| CH2 | 235 | 248 | 118 | L |
| CH2 | 236 | 249 | 119 | G |
| CH2 | 237 | 250 | 120 | G |
| CH2 | 238 | 251 | 121 | P |
| CH2 | 239 | 252 | 122 | S |
| CH2 | 240 | 253 | 123 | V |
| CH2 | 241 | 254 | 124 | F |
| CH2 | 242 | 255 | 125 | L |
| CH2 | 243 | 256 | 126 | F |
| CH2 | 244 | 257 | 127 | P |
| CH2 | 245 | 258 | 128 | P |
| CH2 | 246 | 259 | 129 | K |
| CH2 | 247 | 260 | 130 | P |
| CH2 | 248 | 261 | 131 | K |
| CH2 | 249 | 262 | 132 | D |
| CH2 | 250 | 263 | 133 | T |
| CH2 | 251 | 264 | 134 | L |
| CH2 | 252 | 265 | 135 | M |
| CH2 | 253 | 266 | 136 | I |
| CH2 | 254 | 267 | 137 | S |
| CH2 | 255 | 268 | 138 | R |
| CH2 | 256 | 269 | 139 | T |
| CH2 | 257 | 270 | 140 | P |
| CH2 | 258 | 271 | 141 | E |
| CH2 | 259 | 272 | 142 | V |
| CH2 | 260 | 273 | 143 | T |
| CH2 | 261 | 274 | 144 | C |
| CH2 | 262 | 275 | 145 | V |
| CH2 | 263 | 276 | 146 | V |
| CH2 | 264 | 277 | 147 | V |
| CH2 | 265 | 278 | 148 | D |
| CH2 | 266 | 279 | 149 | V |
| CH2 | 267 | 280 | 150 | S |
| CH2 | 268 | 281 | 151 | H |
| CH2 | 269 | 282 | 152 | E |
| CH2 | 270 | 283 | 153 | D |
| CH2 | 271 | 284 | 154 | P |
| CH2 | 272 | 285 | 155 | E |
| CH2 | 273 | 286 | 156 | V |
| CH2 | 274 | 287 | 157 | K |
| CH2 | 275 | 288 | 158 | F |
| CH2 | 276 | 289 | 159 | N |
| CH2 | 277 | 290 | 160 | W |
| CH2 | 278 | 291 | 161 | Y |
| CH2 | 279 | 292 | 162 | V |
| CH2 | 280 | 295 | 163 | D |
| CH2 | 281 | 296 | 164 | G |
| CH2 | 282 | 299 | 165 | V |
| CH2 | 283 | 300 | 166 | E |
| CH2 | 284 | 301 | 167 | V |
| CH2 | 285 | 302 | 168 | H |
| CH2 | 286 | 303 | 169 | N |
| CH2 | 287 | 304 | 170 | A |
| CH2 | 288 | 305 | 171 | K |
| CH2 | 289 | 306 | 172 | T |
| CH2 | 290 | 307 | 173 | K |
| CH2 | 291 | 308 | 174 | P |
| CH2 | 292 | 309 | 175 | R |
| CH2 | 293 | 310 | 176 | E |
| CH2 | 294 | 311 | 177 | E |
| CH2 | 295 | 312 | 178 | Q |
| CH2 | 296 | 313 | 179 | Y |
| CH2 | 297 | 314 | 180 | N |
| CH2 | 298 | 317 | 181 | S |
| CH2 | 299 | 318 | 182 | T |
| CH2 | 300 | 319 | 183 | Y |
| CH2 | 301 | 320 | 184 | R |
| CH2 | 302 | 321 | 185 | V |
| CH2 | 303 | 322 | 186 | V |
| CH2 | 304 | 323 | 187 | S |
| CH2 | 305 | 324 | 188 | V |
| CH2 | 306 | 325 | 189 | L |
| CH2 | 307 | 326 | 190 | T |
| CH2 | 308 | 327 | 191 | V |
| CH2 | 309 | 328 | 192 | L |
| CH2 | 310 | 329 | 193 | H |
| CH2 | 311 | 330 | 194 | Q |
| CH2 | 312 | 331 | 195 | D |
| CH2 | 313 | 332 | 196 | W |
| CH2 | 314 | 333 | 197 | L |
| CH2 | 315 | 334 | 198 | N |
| CH2 | 316 | 335 | 199 | G |
| CH2 | 317 | 336 | 200 | K |
| CH2 | 318 | 337 | 201 | E |
| CH2 | 319 | 338 | 202 | Y |
| CH2 | 320 | 339 | 203 | K |
| CH2 | 321 | 340 | 204 | C |
| CH2 | 322 | 341 | 205 | K |
| CH2 | 323 | 342 | 206 | V |
| CH2 | 324 | 343 | 207 | S |
| CH2 | 325 | 344 | 208 | N |
| CH2 | 326 | 345 | 209 | K |
| CH2 | 327 | 346 | 210 | A |
| CH2 | 328 | 347 | 211 | L |
| CH2 | 329 | 348 | 212 | P |
| CH2 | 330 | 349 | 213 | A |
| CH2 | 331 | 350 | 214 | P |
| CH2 | 332 | 351 | 215 | I |
| CH2 | 333 | 352 | 216 | E |
| CH2 | 334 | 353 | 217 | K |
| CH2 | 335 | 354 | 218 | T |
| CH2 | 336 | 355 | 219 | I |
| CH2 | 337 | 357 | 220 | S |
| CH2 | 338 | 358 | 221 | K |
| CH2 | 339 | 359 | 222 | A |
| CH2 | 340 | 360 | 223 | K |
| CH3 | 341 | 361 | 224 | G |
| CH3 | 342 | 363 | 225 | Q |
| CH3 | 343 | 364 | 226 | P |
| CH3 | 344 | 365 | 227 | R |
| CH3 | 345 | 366 | 228 | E |
| CH3 | 346 | 367 | 229 | P |
| CH3 | 347 | 368 | 230 | Q |
| CH3 | 348 | 369 | 231 | V |
| CH3 | 349 | 370 | 232 | Y |
| CH3 | 350 | 371 | 233 | T |
| CH3 | 351 | 372 | 234 | L |
| CH3 | 352 | 373 | 235 | P |
| CH3 | 353 | 374 | 236 | P |
| CH3 | 354 | 375 | 237 | S |
| CH3 | 355 | 376 | 238 | R |
| CH3 | 356 | 377 | 239 | D |
| CH3 | 357 | 378 | 240 | E |
| CH3 | 358 | 381 | 241 | L |
| CH3 | 359 | 382 | 242 | T |
| CH3 | 360 | 383 | 243 | K |
| CH3 | 361 | 384 | 244 | N |
| CH3 | 362 | 385 | 245 | Q |
| CH3 | 363 | 386 | 246 | V |
| CH3 | 364 | 387 | 247 | S |
| CH3 | 365 | 388 | 248 | L |
| CH3 | 366 | 389 | 249 | T |
| CH3 | 367 | 390 | 250 | C |
| CH3 | 368 | 391 | 251 | L |
| CH3 | 369 | 392 | 252 | V |
| CH3 | 370 | 393 | 253 | K |
| CH3 | 371 | 394 | 254 | G |
| CH3 | 372 | 395 | 255 | F |
| CH3 | 373 | 396 | 256 | Y |
| CH3 | 374 | 397 | 257 | P |
| CH3 | 375 | 398 | 258 | S |
| CH3 | 376 | 399 | 259 | D |
| CH3 | 377 | 400 | 260 | I |
| CH3 | 378 | 401 | 261 | A |
| CH3 | 379 | 402 | 262 | V |
| CH3 | 380 | 405 | 263 | E |
| CH3 | 381 | 406 | 264 | W |
| CH3 | 382 | 407 | 265 | E |
| CH3 | 383 | 408 | 266 | S |
| CH3 | 384 | 410 | 267 | N |
| CH3 | 385 | 411 | 268 | G |
| CH3 | 386 | 414 | 269 | Q |
| CH3 | 387 | 415 | 270 | P |
| CH3 | 388 | 416 | 271 | E |
| CH3 | 389 | 417 | 272 | N |
| CH3 | 390 | 418 | 273 | N |
| CH3 | 391 | 419 | 274 | Y |
| CH3 | 392 | 420 | 275 | K |
| CH3 | 393 | 421 | 276 | T |
| CH3 | 394 | 422 | 277 | T |
| CH3 | 395 | 423 | 278 | P |
| CH3 | 396 | 424 | 279 | P |
| CH3 | 397 | 425 | 280 | V |
| CH3 | 398 | 426 | 281 | L |
| CH3 | 399 | 427 | 282 | D |
| CH3 | 400 | 428 | 283 | S |
| CH3 | 401 | 430 | 284 | D |
| CH3 | 402 | 433 | 285 | G |
| CH3 | 403 | 434 | 286 | S |
| CH3 | 404 | 435 | 287 | F |
| CH3 | 405 | 436 | 288 | F |
| CH3 | 406 | 437 | 289 | L |
| CH3 | 407 | 438 | 290 | Y |
| CH3 | 408 | 439 | 291 | S |
| CH3 | 409 | 440 | 292 | K |
| CH3 | 410 | 441 | 293 | L |
| CH3 | 411 | 442 | 294 | T |
| CH3 | 412 | 443 | 295 | V |
| CH3 | 413 | 444 | 296 | D |
| CH3 | 414 | 445 | 297 | K |
| CH3 | 415 | 446 | 298 | S |
| CH3 | 416 | 447 | 299 | R |
| CH3 | 417 | 448 | 300 | W |
| CH3 | 418 | 449 | 301 | Q |
| CH3 | 419 | 450 | 302 | Q |
| CH3 | 420 | 451 | 303 | G |
| CH3 | 421 | 452 | 304 | N |
| CH3 | 422 | 453 | 305 | V |
| CH3 | 423 | 454 | 306 | F |
| CH3 | 424 | 455 | 307 | S |
| CH3 | 425 | 456 | 308 | C |
| CH3 | 426 | 457 | 309 | S |
| CH3 | 427 | 458 | 310 | V |
| CH3 | 428 | 459 | 311 | M |
| CH3 | 429 | 460 | 312 | H |
| CH3 | 430 | 461 | 313 | E |
| CH3 | 431 | 462 | 314 | A |
| CH3 | 432 | 463 | 315 | L |
| CH3 | 433 | 464 | 316 | H |
| CH3 | 434 | 465 | 317 | N |
| CH3 | 435 | 466 | 318 | H |
| CH3 | 436 | 467 | 319 | Y |
| CH3 | 437 | 468 | 320 | T |
| CH3 | 438 | 469 | 321 | Q |
| CH3 | 439 | 470 | 322 | K |
| CH3 | 440 | 471 | 323 | S |
| CH3 | 441 | 472 | 324 | L |
| CH3 | 442 | 473 | 325 | S |
| CH3 | 443 | 474 | 326 | L |
| CH3 | 444 | 475 | 327 | S |
| CH3 | 445 | 476 | 328 | P |
| CH3 | 446 | 477 | 329 | G |
| CH3 | 447 | 478 | 330 | K |

TABLE 4
Kabat and EU Numbering of Ig Kappa Light Chain Constant Domain

| 1 | 2 | 3 | 4 | 5 | 6 | 7 | 8 | 9 | 10 | 11 | 12 | 13 | 14 | 15 |
|---|---|---|---|---|---|---|---|---|---|---|---|---|---|---|
| R | T | V | A | A | P | S | V | F | I | F | P | P | S | D |
| 108 | 109 | 110 | 111 | 112 | 113 | 114 | 115 | 116 | 117 | 118 | 119 | 120 | 121 | 122 |
| 108 | 109 | 110 | 111 | 112 | 113 | 114 | 115 | 116 | 117 | 118 | 119 | 120 | 121 | 122 |
| 16 | 17 | 18 | 19 | 20 | 21 | 22 | 23 | 24 | 25 | 26 | 27 | 28 | 29 | 30 |
| E | Q | L | K | S | G | T | A | S | V | V | C | L | L | N |
| 123 | 124 | 125 | 126 | 127 | 128 | 129 | 130 | 131 | 132 | 133 | 134 | 135 | 136 | 137 |
| 123 | 124 | 125 | 126 | 127 | 128 | 129 | 130 | 131 | 132 | 133 | 134 | 135 | 136 | 137 |
| 31 | 32 | 33 | 34 | 35 | 36 | 37 | 38 | 39 | 40 | 41 | 42 | 43 | 44 | 45 |
| N | F | Y | P | R | E | A | K | V | Q | W | K | V | D | N |
| 138 | 139 | 140 | 141 | 142 | 143 | 144 | 145 | 146 | 147 | 148 | 149 | 150 | 151 | 152 |
| 138 | 139 | 140 | 141 | 142 | 143 | 144 | 145 | 146 | 147 | 148 | 149 | 150 | 151 | 152 |
| 46 | 47 | 48 | 49 | 50 | 51 | 52 | 53 | 54 | 55 | 56 | 57 | 58 | 59 | 60 |
| A | L | Q | S | G | N | S | Q | E | S | V | T | E | Q | D |
| 153 | 154 | 155 | 156 | 157 | 158 | 159 | 160 | 161 | 162 | 163 | 164 | 165 | 166 | 167 |
| 153 | 154 | 155 | 156 | 157 | 158 | 159 | 160 | 161 | 162 | 163 | 164 | 165 | 166 | 167 |
| 61 | 62 | 63 | 64 | 65 | 66 | 67 | 68 | 69 | 70 | 71 | 72 | 73 | 74 | 75 |
| S | K | D | S | T | Y | S | L | S | S | T | L | T | L | S |
| 168 | 169 | 170 | 171 | 172 | 173 | 174 | 175 | 176 | 177 | 178 | 179 | 180 | 181 | 182 |
| 168 | 169 | 170 | 171 | 172 | 173 | 174 | 175 | 176 | 177 | 178 | 179 | 180 | 181 | 182 |
| 76 | 77 | 78 | 79 | 80 | 81 | 82 | 83 | 84 | 85 | 86 | 87 | 88 | 89 | 90 |
| K | A | D | Y | E | K | H | K | V | Y | A | C | E | V | T |
| 183 | 184 | 185 | 186 | 187 | 188 | 189 | 190 | 191 | 192 | 193 | 194 | 195 | 196 | 197 |
| 183 | 184 | 185 | 186 | 187 | 188 | 189 | 190 | 191 | 192 | 193 | 194 | 195 | 196 | 197 |
| 91 | 92 | 93 | 94 | 95 | 96 | 97 | 98 | 99 | 100 | 101 | 102 | 103 | 104 | 105 |
| H | Q | G | L | S | S | P | V | T | K | S | F | N | R | G |
| 198 | 199 | 200 | 201 | 202 | 203 | 204 | 205 | 206 | 207 | 208 | 209 | 210 | 211 | 212 |
| 198 | 199 | 200 | 201 | 202 | 203 | 204 | 205 | 206 | 207 | 208 | 209 | 210 | 211 | 212 |

| 106 | 107 |
|---|---|
| E | C |
| 213 | 214 |
| 213 | 214 |

TABLE 5
IgG4 Heavy Chain Constant Domain by
EU, Kabat and Sequential Numbering

Residue Numbering

| | EU | | Sequential | IgG4 |
|---|---|---|---|---|
| Domain | Index | Kabat | (SEQ ID NO: 15) | Sequence |
| CH1 | 118 | 114 | 1 | A |
| CH1 | 119 | 115 | 2 | S |
| CH1 | 120 | 116 | 3 | T |
| CH1 | 121 | 117 | 4 | K |
| CH1 | 122 | 118 | 5 | G |
| CH1 | 123 | 119 | 6 | P |
| CH1 | 124 | 120 | 7 | S |
| CH1 | 125 | 121 | 8 | V |
| CH1 | 126 | 122 | 9 | F |
| CH1 | 127 | 123 | 10 | P |
| CH1 | 128 | 124 | 11 | L |
| CH1 | 129 | 125 | 12 | A |
| CH1 | 130 | 126 | 13 | P |
| CH1 | 131 | 127 | 14 | C |
| CH1 | 132 | 128 | 15 | S |
| CH1 | 133 | 129 | 16 | R |
| CH1 | 134 | 130 | 17 | S |
| CH1 | 135 | 133 | 18 | T |
| CH1 | 136 | 134 | 19 | S |
| CH1 | 137 | 135 | 20 | E |
| CH1 | 138 | 136 | 21 | S |
| CH1 | 139 | 137 | 22 | T |
| CH1 | 140 | 138 | 23 | A |
| CH1 | 141 | 139 | 24 | A |
| CH1 | 142 | 140 | 25 | L |
| CH1 | 143 | 141 | 26 | G |
| CH1 | 144 | 142 | 27 | C |
| CH1 | 145 | 143 | 28 | L |
| CH1 | 146 | 144 | 29 | V |
| CH1 | 147 | 145 | 30 | K |
| CH1 | 148 | 146 | 31 | D |
| CH1 | 149 | 147 | 32 | Y |
| CH1 | 150 | 148 | 33 | F |
| CH1 | 151 | 149 | 34 | P |
| CH1 | 152 | 150 | 35 | E |
| CH1 | 153 | 151 | 36 | P |
| CH1 | 154 | 152 | 37 | V |
| CH1 | 155 | 153 | 38 | T |
| CH1 | 156 | 154 | 39 | V |
| CH1 | 157 | 156 | 40 | S |
| CH1 | 158 | 157 | 41 | W |
| CH1 | 159 | 162 | 42 | N |
| CH1 | 160 | 163 | 43 | S |
| CH1 | 161 | 164 | 44 | G |
| CH1 | 162 | 165 | 45 | A |
| CH1 | 163 | 166 | 46 | L |
| CH1 | 164 | 167 | 47 | T |
| CH1 | 165 | 168 | 48 | S |
| CH1 | 166 | 169 | 49 | G |
| CH1 | 167 | 171 | 50 | V |
| CH1 | 168 | 172 | 51 | H |
| CH1 | 169 | 173 | 52 | T |
| CH1 | 170 | 174 | 53 | F |
| CH1 | 171 | 175 | 54 | P |
| CH1 | 172 | 176 | 55 | A |
| CH1 | 173 | 177 | 56 | V |
| CH1 | 174 | 178 | 57 | L |
| CH1 | 175 | 179 | 58 | Q |
| CH1 | 176 | 180 | 59 | S |
| CH1 | 177 | 182 | 60 | S |
| CH1 | 178 | 183 | 61 | G |
| CH1 | 179 | 184 | 62 | L |
| CH1 | 180 | 185 | 63 | Y |
| CH1 | 181 | 186 | 64 | S |
| CH1 | 182 | 187 | 65 | L |
| CH1 | 183 | 188 | 66 | S |
| CH1 | 184 | 189 | 67 | S |
| CH1 | 185 | 190 | 68 | V |
| CH1 | 186 | 191 | 69 | V |
| CH1 | 187 | 192 | 70 | T |
| CH1 | 188 | 193 | 71 | V |
| CH1 | 189 | 194 | 72 | P |
| CH1 | 190 | 195 | 73 | S |
| CH1 | 191 | 196 | 74 | S |
| CH1 | 192 | 197 | 75 | S |
| CH1 | 193 | 198 | 76 | L |
| CH1 | 194 | 199 | 77 | G |
| CH1 | 195 | 200 | 78 | T |
| CH1 | 196 | 203 | 79 | K |
| CH1 | 197 | 205 | 80 | T |
| CH1 | 198 | 206 | 81 | Y |
| CH1 | 199 | 207 | 82 | T |
| CH1 | 200 | 208 | 83 | C |
| CH1 | 201 | 209 | 84 | N |
| CH1 | 202 | 210 | 85 | V |
| CH1 | 203 | 211 | 86 | D |
| CH1 | 204 | 212 | 87 | H |
| CH1 | 205 | 213 | 88 | K |
| CH1 | 206 | 214 | 89 | P |
| CH1 | 207 | 215 | 90 | S |
| CH1 | 208 | 216 | 91 | N |
| CH1 | 209 | 217 | 92 | T |
| CH1 | 210 | 218 | 93 | K |
| CH1 | 211 | 219 | 94 | V |
| CH1 | 212 | 220 | 95 | D |
| CH1 | 213 | 221 | 96 | K |
| CH1 | 214 | 222 | 97 | R |
| CH1 | 215 | 223 | 98 | V |
| Hinge | 216 | 226 | 99 | E |
| Hinge | 217 | 227 | 100 | S |
| Hinge | 218 | 228 | 101 | K |
| Hinge | 219 | 229 | 102 | Y |
| Hinge | 220 | 230 | 103 | G |
| Hinge | 224 | 237 | 104 | P |
| Hinge | 225 | 238 | 105 | P |
| Hinge | 226 | 239 | 106 | C |
| Hinge | 227 | 240 | 107 | P |
| Hinge | 228 | 241 | 108 | S |
| Hinge | 229 | 242 | 109 | C |
| Hinge | 230 | 243 | 110 | P |
| CH2 | 231 | 244 | 111 | A |
| CH2 | 232 | 245 | 112 | P |
| CH2 | 233 | 246 | 113 | E |
| CH2 | 234 | 247 | 114 | F |
| CH2 | 235 | 248 | 115 | L |
| CH2 | 236 | 249 | 116 | G |
| CH2 | 237 | 250 | 117 | G |
| CH2 | 238 | 251 | 118 | P |
| CH2 | 239 | 252 | 119 | S |
| CH2 | 240 | 253 | 120 | V |
| CH2 | 241 | 254 | 121 | F |
| CH2 | 242 | 255 | 122 | L |
| CH2 | 243 | 256 | 123 | F |
| CH2 | 244 | 257 | 124 | P |
| CH2 | 245 | 258 | 125 | P |
| CH2 | 246 | 259 | 126 | K |
| CH2 | 247 | 260 | 127 | P |
| CH2 | 248 | 261 | 128 | K |
| CH2 | 249 | 262 | 129 | D |
| CH2 | 250 | 263 | 130 | T |
| CH2 | 251 | 264 | 131 | L |
| CH2 | 252 | 265 | 132 | M |
| CH2 | 253 | 266 | 133 | I |
| CH2 | 254 | 267 | 134 | S |
| CH2 | 255 | 268 | 135 | R |
| CH2 | 256 | 269 | 136 | T |
| CH2 | 257 | 270 | 137 | P |
| CH2 | 258 | 271 | 138 | E |
| CH2 | 259 | 272 | 139 | V |
| CH2 | 260 | 273 | 140 | T |
| CH2 | 261 | 274 | 141 | C |
| CH2 | 262 | 275 | 142 | V |
| CH2 | 263 | 276 | 143 | V |
| CH2 | 264 | 277 | 144 | V |
| CH2 | 265 | 278 | 145 | D |
| CH2 | 266 | 279 | 146 | V |
| CH2 | 267 | 280 | 147 | S |
| CH2 | 268 | 281 | 148 | Q |
| CH2 | 269 | 282 | 149 | E |
| CH2 | 270 | 283 | 150 | D |
| CH2 | 271 | 284 | 151 | P |
| CH2 | 272 | 285 | 152 | E |
| CH2 | 273 | 286 | 153 | V |
| CH2 | 274 | 287 | 154 | Q |
| CH2 | 275 | 288 | 155 | F |
| CH2 | 276 | 289 | 156 | N |
| CH2 | 277 | 290 | 157 | W |
| CH2 | 278 | 291 | 158 | Y |
| CH2 | 279 | 292 | 159 | V |
| CH2 | 280 | 295 | 160 | D |
| CH2 | 281 | 296 | 161 | G |
| CH2 | 282 | 299 | 162 | V |
| CH2 | 283 | 300 | 163 | E |
| CH2 | 284 | 301 | 164 | V |
| CH2 | 285 | 302 | 165 | H |
| CH2 | 286 | 303 | 166 | N |
| CH2 | 287 | 304 | 167 | A |
| CH2 | 288 | 305 | 168 | K |
| CH2 | 289 | 306 | 169 | T |
| CH2 | 290 | 307 | 170 | K |
| CH2 | 291 | 308 | 171 | P |
| CH2 | 292 | 309 | 172 | R |
| CH2 | 293 | 310 | 173 | E |
| CH2 | 294 | 311 | 174 | E |
| CH2 | 295 | 312 | 175 | Q |
| CH2 | 296 | 313 | 176 | F |
| CH2 | 297 | 314 | 177 | N |
| CH2 | 298 | 317 | 178 | S |
| CH2 | 299 | 318 | 179 | T |
| CH2 | 300 | 319 | 180 | Y |
| CH2 | 301 | 320 | 181 | R |
| CH2 | 302 | 321 | 182 | V |
| CH2 | 303 | 322 | 183 | V |
| CH2 | 304 | 323 | 184 | S |
| CH2 | 305 | 324 | 185 | V |
| CH2 | 306 | 325 | 186 | L |
| CH2 | 307 | 326 | 187 | T |
| CH2 | 308 | 327 | 188 | V |
| CH2 | 309 | 328 | 189 | L |
| CH2 | 310 | 329 | 190 | H |
| CH2 | 311 | 330 | 191 | Q |
| CH2 | 312 | 331 | 192 | D |
| CH2 | 313 | 332 | 193 | W |
| CH2 | 314 | 333 | 194 | L |
| CH2 | 315 | 334 | 195 | N |
| CH2 | 316 | 335 | 196 | G |
| CH2 | 317 | 336 | 197 | K |
| CH2 | 318 | 337 | 198 | E |
| CH2 | 319 | 338 | 199 | Y |
| CH2 | 320 | 339 | 200 | K |
| CH2 | 321 | 340 | 201 | C |
| CH2 | 322 | 341 | 202 | K |
| CH2 | 323 | 342 | 203 | V |
| CH2 | 324 | 343 | 204 | S |
| CH2 | 325 | 344 | 205 | N |
| CH2 | 326 | 345 | 206 | K |
| CH2 | 327 | 346 | 207 | G |
| CH2 | 328 | 347 | 208 | L |
| CH2 | 329 | 348 | 209 | P |
| CH2 | 330 | 349 | 210 | S |
| CH2 | 331 | 350 | 211 | S |
| CH2 | 332 | 351 | 212 | I |
| CH2 | 333 | 352 | 213 | E |
| CH2 | 334 | 353 | 214 | K |
| CH2 | 335 | 354 | 215 | T |
| CH2 | 336 | 355 | 216 | I |
| CH2 | 337 | 357 | 217 | S |
| CH2 | 338 | 358 | 218 | K |
| CH2 | 339 | 359 | 219 | A |
| CH2 | 340 | 360 | 220 | K |
| CH3 | 341 | 361 | 221 | G |
| CH3 | 342 | 363 | 222 | Q |
| CH3 | 343 | 364 | 223 | P |
| CH3 | 344 | 365 | 224 | R |
| CH3 | 345 | 366 | 225 | E |
| CH3 | 346 | 367 | 226 | P |
| CH3 | 347 | 368 | 227 | Q |
| CH3 | 348 | 369 | 228 | V |
| CH3 | 349 | 370 | 229 | Y |
| CH3 | 350 | 371 | 230 | T |
| CH3 | 351 | 372 | 231 | L |
| CH3 | 352 | 373 | 232 | P |
| CH3 | 353 | 374 | 233 | P |
| CH3 | 354 | 375 | 234 | S |
| CH3 | 355 | 376 | 235 | Q |
| CH3 | 356 | 377 | 236 | E |
| CH3 | 357 | 378 | 237 | E |
| CH3 | 358 | 381 | 238 | M |
| CH3 | 359 | 382 | 239 | T |
| CH3 | 360 | 383 | 240 | K |
| CH3 | 361 | 384 | 241 | N |
| CH3 | 362 | 385 | 242 | Q |
| CH3 | 363 | 386 | 243 | V |
| CH3 | 364 | 387 | 244 | S |
| CH3 | 365 | 388 | 245 | L |
| CH3 | 366 | 389 | 246 | T |
| CH3 | 367 | 390 | 247 | C |
| CH3 | 368 | 391 | 248 | L |
| CH3 | 369 | 392 | 249 | V |
| CH3 | 370 | 393 | 250 | K |
| CH3 | 371 | 394 | 251 | G |
| CH3 | 372 | 395 | 252 | F |
| CH3 | 373 | 396 | 253 | Y |
| CH3 | 374 | 397 | 254 | P |
| CH3 | 375 | 398 | 255 | S |
| CH3 | 376 | 399 | 256 | D |
| CH3 | 377 | 400 | 257 | I |
| CH3 | 378 | 401 | 258 | A |
| CH3 | 379 | 402 | 259 | V |
| CH3 | 380 | 405 | 260 | E |
| CH3 | 381 | 406 | 261 | W |
| CH3 | 382 | 407 | 262 | E |
| CH3 | 383 | 408 | 263 | S |
| CH3 | 384 | 410 | 264 | N |
| CH3 | 385 | 411 | 265 | G |
| CH3 | 386 | 414 | 266 | Q |
| CH3 | 387 | 415 | 267 | P |
| CH3 | 388 | 416 | 268 | E |
| CH3 | 389 | 417 | 269 | N |
| CH3 | 390 | 418 | 270 | N |
| CH3 | 391 | 419 | 271 | Y |
| CH3 | 392 | 420 | 272 | K |
| CH3 | 393 | 421 | 273 | T |
| CH3 | 394 | 422 | 274 | T |
| CH3 | 395 | 423 | 275 | P |
| CH3 | 396 | 424 | 276 | P |
| CH3 | 397 | 425 | 277 | V |
| CH3 | 398 | 426 | 278 | L |
| CH3 | 399 | 427 | 279 | D |
| CH3 | 400 | 428 | 280 | S |
| CH3 | 401 | 430 | 281 | D |
| CH3 | 402 | 433 | 282 | G |
| CH3 | 403 | 434 | 283 | S |
| CH3 | 404 | 435 | 284 | F |
| CH3 | 405 | 436 | 285 | F |
| CH3 | 406 | 437 | 286 | L |
| CH3 | 407 | 438 | 287 | Y |
| CH3 | 408 | 439 | 288 | S |
| CH3 | 409 | 440 | 289 | R |
| CH3 | 410 | 441 | 290 | L |
| CH3 | 411 | 442 | 291 | T |
| CH3 | 412 | 443 | 292 | V |
| CH3 | 413 | 444 | 293 | D |
| CH3 | 414 | 445 | 294 | K |
| CH3 | 415 | 446 | 295 | S |
| CH3 | 416 | 447 | 296 | R |
| CH3 | 417 | 448 | 297 | W |
| CH3 | 418 | 449 | 298 | Q |
| CH3 | 419 | 450 | 299 | E |
| CH3 | 420 | 451 | 300 | G |
| CH3 | 421 | 452 | 301 | N |
| CH3 | 422 | 453 | 302 | V |
| CH3 | 423 | 454 | 303 | F |
| CH3 | 424 | 455 | 304 | S |
| CH3 | 425 | 456 | 305 | C |
| CH3 | 426 | 457 | 306 | S |
| CH3 | 427 | 458 | 307 | V |
| CH3 | 428 | 459 | 308 | M |
| CH3 | 429 | 460 | 309 | H |
| CH3 | 430 | 461 | 310 | E |
| CH3 | 431 | 462 | 311 | A |
| CH3 | 432 | 463 | 312 | L |
| CH3 | 433 | 464 | 313 | H |
| CH3 | 434 | 465 | 314 | N |
| CH3 | 435 | 466 | 315 | H |
| CH3 | 436 | 467 | 316 | Y |
| CH3 | 437 | 468 | 317 | T |
| CH3 | 438 | 469 | 318 | Q |
| CH3 | 439 | 470 | 319 | K |
| CH3 | 440 | 471 | 320 | S |
| CH3 | 441 | 472 | 321 | L |
| CH3 | 442 | 473 | 322 | S |
| CH3 | 443 | 474 | 323 | L |
| CH3 | 444 | 475 | 324 | S |
| CH3 | 445 | 476 | 325 | L |
| CH3 | 446 | 477 | 326 | G |
| CH3 | 447 | 478 | 327 | K |

[0454] As used herein, the phrase “derived from,” when referring to antibody fragments derived from another antibody, such as a monoclonal antibody, refers to the engineering of antibody fragments (e.g., Fab, F(ab′), F(ab′)2, single-chain Fv (scFv), Fv, dsFv, dAb, diabody, Fd and Fd′ fragments) that retain the binding specificity of the original antibody. Such fragments can be derived by a variety of methods known in the art, including, but not limited to, enzymatic cleavage, chemical crosslinking, recombinant means, or combinations thereof. Generally, the derived antibody fragment shares the identical, or substantially identical, heavy chain variable region (VHI) and light chain variable region (VL) of the parent antibody, such that the antibody fragment and the parent antibody bind the same epitope. As used herein, a “parent antibody” or “source antibody” refers to an antibody from which an antibody fragment (e.g., Fab, F(ab′), F(ab)2, single-chain Fv (scFv), Fv, dsFv, dAb, diabody, Fd and Fd′ fragments) is derived.

[0455] As used herein, the term “epitope” refers to any antigenic determinant on an antigen or protein, to which the paratope of an antibody can bind. Epitopic determinants typically contain chemically active surface groupings of molecules, such as amino acids or sugar side chains, and typically have specific three-dimensional structural characteristics, as well as specific charge characteristics.

[0456] As used herein, “humanized antibodies” and human therapeutics refer to antibodies and other protein therapeutics that are modified to include “human” sequences of amino acids, so that administration to a human does not provoke an immune response. A humanized antibody, for example, typically contains complementarity determining regions (CDRs or hypervariable loops) derived from a non-human species immunoglobulin, and the remainder of the antibody molecule derived mainly from a human immunoglobulin. Methods for humanizing proteins, including antibodies, and producing them are well known and readily available to those of skill in the art. For example, DNA encoding a monoclonal antibody can be altered by recombinant DNA techniques to encode an antibody in which the amino acid composition of the non-variable regions is based on human antibodies. Methods for identifying such regions are known, including computer programs, which are designed for identifying the variable and non-variable regions of immunoglobulins. Hence, in general, the humanized antibody contains substantially all of at least one, and typically two, variable domains, in which all or substantially all of the hypervariable loops (e.g., CDRs) correspond to those of a non-human immunoglobulin, and all or substantially all of the framework regions (FRs) are those of a human immunoglobulin sequence. The humanized antibody, optionally, also contains at least a portion of an immunoglobulin constant region (Fc), typically that of a human immunoglobulin.

[0457] As used herein, a “multimerization domain” refers to a sequence of amino acids that promotes stable interaction of a polypeptide molecule with one or more additional polypeptide molecules, each containing a complementary multimerization domain, which can be the same or a different multimerization domain, to form a stable multimer with the first domain. Generally, a polypeptide is joined directly or indirectly to the multimerization domain. Exemplary multimerization domains include the immunoglobulin sequences or portions thereof, leucine zippers, hydrophobic regions, hydrophilic regions, and compatible protein-protein interaction domains. The multimerization domain, for example, can be an immunoglobulin constant region or domain, such as, for example, the Fc domain or portions thereof from IgG, including IgG1, IgG2, IgG3 or IgG4 subtypes, IgA, IgE, IgD and IgM, and modified forms thereof.

[0458] As used herein, “dimerization domains” are multimerization domains that facilitate interaction between two polypeptide sequences (such as, but not limited to, antibody chains). Dimerization domains include, but are not limited to, an amino acid sequence containing a cysteine residue that facilitates the formation of a disulfide bond between two polypeptide sequences, such as all or a part of a full-length antibody hinge region, or one or more dimerization sequences, which are sequences of amino acids known to promote interaction between polypeptides (e.g., leucine zippers, GCN4 zippers).

[0459] As used herein, a “chimeric polypeptide” refers to a polypeptide that contains portions from at least two different polypeptides or from two non-contiguous portions of a single polypeptide. Thus, a chimeric polypeptide generally includes a sequence of amino acid residues from all or a part of one polypeptide, and a sequence of amino acids from all or a part of another different polypeptide. The two portions can be linked directly or indirectly and can be linked via peptide bonds, other covalent bonds, or other non-covalent interactions of sufficient strength to maintain the integrity of a substantial portion of the chimeric polypeptide under equilibrium conditions and physiologic conditions, such as in isotonic pH 7 buffered saline. As used herein, a “fusion protein” is a polypeptide engineered to contain sequences of amino acids corresponding to two distinct polypeptides, which are joined together, such as by expressing the fusion protein from a vector containing two nucleic acids, encoding the two polypeptides, in close proximity, e.g., adjacent, to one another along the length of the vector. Accordingly, a fusion protein refers to a chimeric protein containing two, or portions from two, or more proteins or peptides that are linked directly or indirectly via peptide bonds. The two molecules can be adjacent in the construct, or can be separated by a linker, or spacer polypeptide.

[0460] As used herein, a “linker,” “linker unit,” or “link,” refers to a peptide or chemical moiety containing a chain of atoms that covalently attaches an antibody or antigen-binding fragment thereof to another therapeutic moiety or another antibody or fragment thereof. Linkers are included, for example, to increase flexibility, modify steric effects, including steric hindrance, and increase solubility in aqueous medium.

[0461] As used herein, a “linker peptide” or “spacer peptide” refers to short sequences of amino acids that join two polypeptide sequences (or nucleic acids encoding such as an amino acid sequence). “Peptide linker” refers to the short sequence of amino acids joining the two polypeptide sequences. Exemplary of polypeptide linkers are linkers joining a peptide transduction domain to an antibody, or linkers joining two antibody chains in a synthetic antibody fragment, such as an scFv fragment. Linkers are well-known, and any known linkers can be used in the provided methods. Exemplary polypeptide linkers include (Gly-Ser)ₙ amino acid sequences, with some Glu or Lys residues dispersed throughout to increase solubility. Other exemplary linkers are described herein; any of these and other known linkers can be used with the polypeptides, antibodies, and other products and methods provided herein.

[0462] As used herein, a “tag” or an “epitope tag” refers to a sequence of amino acids, typically added to the N- or C-terminus of a polypeptide, such as an antibody and an antibody fragment/construct, provided herein. The inclusion of tags fused to a polypeptide can facilitate polypeptide purification and/or detection. Typically, a tag or tag polypeptide refers to a polypeptide that has enough residues to provide an epitope recognized by an antibody, or that can serve for detection or purification, yet is short enough such that it does not interfere with activity of the polypeptide to which it is linked. The tag polypeptide typically is sufficiently unique so that an antibody that specifically binds thereto does not substantially cross-react with epitopes in the polypeptide to which it is linked. Suitable tag polypeptides generally have at least 5 or 6 amino acid residues, and usually between about 8-50 amino acid residues, typically between 9-30 residues. The tags can be linked to one or more chimeric polypeptides in a multimer and permit detection of the multimer or its recovery from a sample or mixture. Such tags are well-known and can be readily synthesized and designed. Exemplary tag polypeptides include those used for affinity purification and include, for example, FLAG tags; His tags; the influenza hemagglutinin (HA) tag polypeptide and its antibody 12CA5 (see, e.g., Field et al. (1988) Mol. Cell. Biol. 8:2159-2165); the c-myc tag and the 8F9, 3C7, 6E10, G4, B7 and 9E10 antibodies thereto (see, e.g., Evan et al. (1985) Molecular and Cellular Biology 5:3610-3616); and the Herpes Simplex virus glycoprotein D (gD) tag and its antibody (see, e.g., Paborsky et al. (1990) Protein Engineering 3:547-553). An antibody used to detect an epitope-tagged antibody is typically referred to herein as a secondary antibody.

[0463] As used herein, a “label” or “detectable moiety” is a detectable marker (e.g., a fluorescent molecule, chemiluminescent molecule, bioluminescent molecule, contrast agent (e.g., a metal), radionuclide, chromophore, detectable peptide, or an enzyme that catalyzes the formation of a detectable product) that can be attached or linked directly or indirectly to a molecule (e.g., an antibody or antigen-binding fragment thereof, such as an anti-TNFR1 antibody or antigen-binding fragment thereof provided herein), or associated therewith, and can be detected in vivo and/or in vitro. The detection method can be any method known in the art, including known in vivo and/or in vitro methods of detection (e.g., imaging by visual inspection, magnetic resonance (MR) spectroscopy, ultrasound signal, X-ray, gamma ray spectroscopy (e.g., positron emission tomography (PET) scanning, single-photon emission computed tomography (SPECT)), fluorescence spectroscopy, or absorption). Indirect detection refers to measurement of a physical phenomenon, such as energy or particle emission or absorption, of an atom, molecule or composition that binds directly or indirectly to the detectable moiety (e.g., detection of a labeled secondary antibody or antigen-binding fragment thereof that binds to a primary antibody (e.g., an anti-TNFR antibody or antigen-binding fragment thereof provided herein)).

[0464] As used herein, “nucleic acid” refers to at least two linked nucleotides or nucleotide derivatives, including a deoxyribonucleic acid (DNA) and a ribonucleic acid (RNA), joined together, typically by phosphodiester linkages. Also included in the term “nucleic acid” are analogs of nucleic acids, such as peptide nucleic acid (PNA), phosphorothioate DNA, and other such analogs and derivatives or combinations thereof. Nucleic acids also include DNA and RNA derivatives containing, for example, a nucleotide analog or a “backbone” bond other than a phosphodiester bond, for example, a phosphotriester bond, a phosphoramidate bond, a phosphorothioate bond, a thioester bond, or a peptide bond (i.e., peptide nucleic acid). The term also includes, as equivalents, derivatives, variants and analogs of either RNA or DNA made from nucleotide analogs, single (sense or antisense) and double-stranded nucleic acids. Deoxyribonucleotides include deoxyadenosine, deoxycytidine, deoxyguanosine and deoxythymidine. For RNA, the uracil base is uridine.

[0465] As used herein, an “isolated nucleic acid molecule” is one which is separated from other nucleic acid molecules which are present in the natural source of the nucleic acid molecule. An “isolated” nucleic acid molecule, such as a cDNA molecule, can be substantially free of other cellular material, or culture medium, when produced by recombinant techniques, or substantially free of chemical precursors or other chemicals, when chemically synthesized. Exemplary isolated nucleic acid molecules provided herein include isolated nucleic acid molecules encoding an antibody or antigen-binding fragments provided.

[0466] As used herein, “operably linked,” with reference to nucleic acid sequences, regions, elements, or domains, means that the nucleic acid regions are functionally related to each other. For example, nucleic acid encoding a leader peptide can be operably linked to nucleic acid encoding a polypeptide, whereby the nucleic acids can be transcribed and translated to express a functional fusion protein, wherein the leader peptide effects secretion of the fusion polypeptide. In some instances, the nucleic acid encoding a first polypeptide (e.g., a leader peptide) is operably linked to nucleic acid encoding a second polypeptide, and the nucleic acids are transcribed as a single mRNA transcript, but translation of the mRNA transcript can result in one of two polypeptides being expressed. For example, an amber stop codon can be located between the nucleic acid encoding the first polypeptide and the nucleic acid encoding the second polypeptide, such that, when introduced into a partial amber suppressor cell, the resulting single mRNA transcript can be translated to produce either a fusion protein containing the first and second polypeptides, or can be translated to produce only the first polypeptide. In another example, a promoter can be operably linked to nucleic acid encoding a polypeptide, whereby the promoter regulates or mediates the transcription of the nucleic acid.

[0467] As used herein, “synthetic,” with reference to, for example, a synthetic nucleic acid molecule or a synthetic gene or a synthetic peptide, refers to a nucleic acid molecule or gene or polypeptide molecule that is produced by recombinant methods and/or by chemical synthesis methods.

[0468] As used herein, the residues of naturally occurring α-amino acids are the residues of those 20 α-amino acids found in nature which are incorporated into a protein by the specific recognition of the charged tRNA molecule with its cognate mRNA codon in humans.

[0469] As used herein, “polypeptide” refers to two or more amino acids covalently joined. The terms “polypeptide” and “protein” are used interchangeably herein.

[0470] As used herein, a “peptide” refers to a polypeptide that is from 2 to about or amino acids in length.

[0471] As used herein, a “DNA construct” is a single- or double-stranded, linear, or circular DNA molecule that contains segments of DNA combined and juxtaposed in a manner not found in nature. DNA constructs exist as a result of human manipulation, and include clones and other copies of manipulated molecules.

[0472] As used herein, a “DNA segment” is a portion of a larger DNA molecule having specified attributes. For example, a DNA segment encoding a specified polypeptide is a portion of a longer DNA molecule, such as a plasmid or plasmid fragment, which, when read from the 5′ to 3′ direction, encodes the sequence of amino acids of the specified polypeptide.

[0473] As used herein, the term “polynucleotide” means a single- or double-stranded polymer of deoxyribonucleotides or ribonucleotide bases read from the 5′ to the 3′ end. Polynucleotides include RNA and DNA, and can be isolated from natural sources, synthesized in vitro, or prepared from a combination of natural and synthetic molecules. The length of a polynucleotide molecule is given herein in terms of nucleotides (abbreviated “nt”) or base pairs (abbreviated “bp”). The term nucleotides is used for single- and double-stranded molecules where the context permits. When the term is applied to double-stranded molecules, it is used to denote overall length and is understood to be equivalent to the term base pairs. It will be recognized by those skilled in the art that the two strands of a double-stranded polynucleotide can differ slightly in length and that the ends thereof can be staggered; thus, all nucleotides within a double-stranded polynucleotide molecule cannot be paired. Such unpaired ends will, in general, not exceed 20 nucleotides in length.

[0474] As used herein, production by recombinant means by using recombinant DNA methods refers to the use of the well-known methods of molecular biology for expressing proteins encoded by cloned DNA.

[0475] As used herein, “expression” refers to the process by which polypeptides are produced by transcription and translation of polynucleotides. The level of expression of a polypeptide can be assessed using any method known in art, including, for example, methods of determining the amount of the polypeptide produced from the host cell. Such methods can include, but are not limited to, quantitation of the polypeptide in the cell lysate by ELISA, Coomassie blue staining following gel electrophoresis, Lowry protein assay, and Bradford protein assay.

[0476] As used herein, a “host cell” is a cell that is used to receive, maintain, reproduce and/or amplify a vector. A host cell also can be used to express the polypeptide encoded by the vector. The nucleic acid in the vector is replicated when the host cell divides, thereby amplifying the nucleic acids.

[0477] As used herein, a “vector” is a replicable nucleic acid from which one or more heterologous proteins can be expressed when the vector is transformed into an appropriate host cell. Reference to a vector includes those vectors into which a nucleic acid encoding a polypeptide or fragment thereof can be introduced, typically by restriction digest and ligation. Reference to a vector also includes those vectors that contain nucleic acid encoding a polypeptide, such as a modified anti-TNFR1 antibody. The vector is used to introduce the nucleic acid encoding the polypeptide into the host cell for amplification of the nucleic acid, or for expression/display of the polypeptide encoded by the nucleic acid. The vectors typically remain episomal, but can be designed to effect integration of a gene or portion thereof into a chromosome of the genome. Also contemplated are vectors that are artificial chromosomes, such as yeast artificial chromosomes and mammalian artificial chromosomes. Selection and use of such vehicles are well-known to those of skill in the art. A vector also includes “virus vectors” or “viral vectors.” Viral vectors are engineered viruses that are operatively linked to exogenous genes to transfer (as vehicles or shuttles) the exogenous genes into cells.

[0478] As used herein, an “expression vector” includes vectors capable of expressing DNA that is operatively linked with regulatory sequences, such as promoter regions, that are capable of effecting expression of such DNA fragments. Such additional segments can include promoter and terminator sequences, and optionally can include one or more origins of replication, one or more selectable markers, an enhancer, a polyadenylation signal, and the like. Expression vectors are generally derived from plasmid or viral DNA, or can contain elements of both. Thus, an expression vector refers to a recombinant DNA or RNA construct, such as a plasmid, a phage, recombinant virus, or other vector that, upon introduction into an appropriate host cell, results in expression of the cloned DNA. Appropriate expression vectors are well-known to those of skill in the art and include those that are replicable in eukaryotic cells and/or prokaryotic cells, and those that remain episomal, or those which integrate into the host cell genome.

[0479] As used herein, “primary sequence” refers to the sequence of amino acid residues in a polypeptide or the sequence of nucleotides in a nucleic acid molecule.

[0480] As used herein, a “global alignment” is an alignment that aligns two sequences from beginning to end, aligning each letter in each sequence only once. An alignment is produced, regardless of whether or not there is similarity or identity between the sequences. For example, 50% sequence identity based on “global alignment” means that in an alignment of the full sequence of two compared sequences, each of 100 nucleotides in length, 50% of the residues are the same. It is understood that global alignment also can be used in determining sequence identity even when the length of the aligned sequences is not the same. The differences in the terminal ends of the sequences are taken into account in determining sequence identity, unless the “no penalty for end gaps” is selected. Generally, a global alignment is used on sequences that share significant similarity over most of their length. Exemplary algorithms for performing global alignment include the Needleman-Wunsch algorithm (Needleman et al. (1970) J. Mol. Biol. 48:443). Exemplary programs for performing global alignment are publicly available and include the Global Sequence Alignment Tool available at the National Center for Biotechnology Information (NCBI) website (ncbi.nlm.nih.gov/), and the program available at deepc2.psi.iastate.edu/aat/align/align.html.

[0481] As used herein, a “local alignment” is an alignment that aligns two sequences, but only aligns those portions of the sequences that share similarity or identity. Hence, a local alignment determines if sub-segments of one sequence are present in another sequence. If there is no similarity, no alignment will be returned. Local alignment algorithms include BLAST or Smith-Waterman algorithm (Adv. Appl. Math. 2:482 (1981)). For example, 50% sequence identity based on “local alignment” means that in an alignment of the full sequence of two compared sequences of any length, a region of similarity or identity of 100 nucleotides in length has 50% of the residues that are the same in the region of similarity or identity.

[0482] For purposes herein, sequence identity can be determined by standard alignment algorithm programs used with default gap penalties established by each supplier. Default parameters for the GAP program can include: (1) a unary comparison matrix (containing a value of 1 for identities and 0 for non-identities) and the weighted comparison matrix of Gribskov et al. Nucl. Acids Res. 14:6745 (1986), as described by Schwartz and Dayhoff, eds., Atlas of Protein Sequence and Structure, National Biomedical Research Foundation, pp. 353-358 (1979); (2) a penalty of 3.0 for each gap and an additional 0.10 penalty for each symbol in each gap; and (3) no penalty for end gaps. Whether any two nucleic acid molecules have nucleotide sequences, or any two polypeptides have amino acid sequences, that are at least 80%, 85%, 90%, 95%, 96%, 97%, 98% or 99% “identical,” or other similar variations reciting a percent identity, can be determined using known computer algorithms based on local or global alignment (see, e.g., wikipedia.org/wiki/Sequence_alignment_software, providing links to dozens of known and publicly available alignment databases and programs). Generally, for purposes herein sequence identity is determined using computer algorithms based on global alignment, such as the Needleman-Wunsch Global Sequence Alignment tool available from NCBI/BLAST (blast.ncbi.nlm.nih.gov/Blast.cgi?CMD=Web&Page_TYPE=BlastHome); LAlign (William Pearson implementing the Huang and Miller algorithm (Adv. Appl. Math. (1991) 12:337-357)); and the program from Xiaoqui Huang, available at deepc2.psi.iastate.edu/aat/align/align.html. Typically, the full-length sequence of each of the compared polypeptides or nucleotides is aligned across the full-length of each sequence in a global alignment. Local alignment also can be used when the sequences being compared are substantially the same length.

[0483] As used herein, a “disulfide bond” (also called an S—S bond or a disulfide bridge) is a single covalent bond derived from the coupling of thiol groups. Disulfide bonds in proteins are formed between the thiol groups of cysteine residues, and stabilize interactions between polypeptide domains, such as antibody domains.

[0484] As used herein, “coupled” or “conjugated” means attached via a covalent or noncovalent interaction.

[0485] As used herein, the phrase “conjugated to an antibody” or “linked to an antibody” or grammatical variations thereof, when referring to the attachment of a moiety to an antibody or antigen-binding fragment thereof, such as a diagnostic or therapeutic moiety, means that the moiety is attached to the antibody or antigen-binding fragment thereof by any known means for linking peptides, such as, for example, by production of fusion proteins by recombinant means, or post-translationally by chemical means. Conjugation can employ any of a variety of linking agents to effect conjugation, including, but not limited to, peptide or compound linkers, or chemical cross-linking agents.

[0486] As used herein, “antibody-dependent cell-mediated cytotoxicity,” “antibody-dependent cellular cytotoxicity” and “ADCC” refer, interchangeably, to cell-mediated reactions in which nonspecific cytotoxic cells that express Fc receptors (FcRs) (e.g., natural killer (NK) cells, neutrophils, and macrophages) recognize bound antibody on a target cell and subsequently cause lysis of the target cell. The primary cells for mediating ADCC, NK cells, express FcγRIII only, whereas monocytes express FcγRI, FcγRII and FcγRIII. FcR expression on hematopoietic cells is summarized in Table 3 on page 464 of Ravetch et al. (1991) Annu. Rev. Immunol, 9:457-492. To assess ADCC activity of a molecule of interest, an in vitro ADCC assay may be performed (see, e.g., U.S. Pat. Nos. 5,500,362 and 5,821,337). Exemplary effector cells for such assays include peripheral blood mononuclear cells (PBMCs) and natural killer (NK) cells. Alternatively, or additionally, ADCC activity of the molecule of interest may be assessed in vivo, e.g., in an animal model, such as that disclosed in Clynes et al. (1998) Proc. Natl. Acad. Sci. USA 95:652 656.

[0487] As used herein, complement-dependent cytotoxicity (CDC) is an effector function of IgG and IgM antibodies. When such antibodies are bound to a surface antigen on target cell, such as a bacterial cell or viral-infected cell, the classical complement pathway is triggered by bonding protein Clq to these antibodies, resulting in formation of a membrane attack complex (MAC) and subsequent cell lysis.

[0488] As used herein, antibody-dependent cellular phagocytosis (ADCP) is a cellular process by which effector cells with phagocytic potential, such as monocytes and macrophages, internalize target cells. Once phagocytosed, the target cell resides in a phagosome, which fuses with a lysosome for degradation of the target cell via an oxygen-dependent or independent mechanism.

[0489] As used herein “therapeutic activity” refers to the in vivo activity of a therapeutic polypeptide. Generally, the therapeutic activity is the activity that is associated with treatment of a disease or condition. Therapeutic activity of a modified polypeptide can be any level of percentage of the therapeutic activity of the unmodified polypeptide, including but not limited to, 1% of the activity, 2%, 3%, 4%, 5%, 10%, 20%, 30%, 40%, 50%, 60%, 70%, 80%, 90%, 91%, 92%, 93%, 94%, 95%, 96%, 97%, 98%, 99%, 100%, 200%, 300%, 400%, 500%, or more, of the therapeutic activity compared to the unmodified polypeptide.

[0490] As used herein, the term “assessing” is intended to include quantitative and qualitative determination in the sense of obtaining an absolute value for the activity of a protein, such as an antibody, or an antigen-binding fragment thereof, present in the sample, and also, of obtaining an index, ratio, percentage, visual, or other value indicative of the level of the activity. Assessment can be direct or indirect.

[0491] As used herein, a “disease or disorder” refers to a pathological condition in an organism, resulting from a cause or condition including, but not limited to, infections, acquired conditions, and genetic conditions, and characterized by identifiable symptoms.

[0492] As used herein, “treating” a subject with a disease or condition means that the subject's symptoms are partially or totally alleviated, or remain static following treatment. Hence, treatment encompasses prophylaxis, therapy and/or cure.

[0493] Prophylaxis refers to prevention of a potential disease and/or a prevention of worsening of symptoms or progression of a disease. Treatment also encompasses any pharmaceutical use of any antibody or antigen-binding fragment thereof, or compositions, provided herein.

[0494] As used herein, treatment means amelioration of a symptom or manifestation of a disease, disorder, or condition.

[0495] As used herein, “prevention” or “prophylaxis,” refers to methods in which the risk of developing a disease or condition is reduced. To prevent a disease means to reduce the risk of developing the disease.

[0496] As used herein, a “pharmaceutically effective agent” includes any therapeutic agent or bioactive agent, including, but not limited to, for example, anesthetics, vasoconstrictors, dispersing agents, and conventional therapeutic drugs, including small molecule drugs and therapeutic proteins.

[0497] As used herein, a “therapeutic effect” means an effect resulting from treatment of a subject that alters, typically improves, or ameliorates, the symptoms of a disease or condition, or that cures a disease or condition.

[0498] As used herein, a “therapeutically effective amount” or a “therapeutically effective dose” refers to the quantity of an agent, compound, material, or composition containing a compound that is at least sufficient to produce a therapeutic effect following administration to a subject. Hence, it is the quantity necessary for preventing, curing, ameliorating, arresting, or partially arresting a symptom of a disease or disorder.

[0499] As used herein, “therapeutic efficacy” refers to the ability of an agent, compound, material, or composition containing a compound to produce a therapeutic effect in a subject to whom the agent, compound, material, or composition containing a compound has been administered.

[0500] As used herein, a “prophylactically effective amount” or a “prophylactically effective dose” refers to the quantity of an agent, compound, material, or composition containing a compound, that, when administered to a subject, will have the intended prophylactic effect, e.g., preventing or delaying the onset, or reoccurrence, of disease or symptoms, reducing the likelihood of the onset, or reoccurrence, of disease or symptoms, or reducing the incidence of viral infection. The full prophylactic effect does not necessarily occur by administration of one dose, and can occur only after administration of a series of doses. Thus, a prophylactically effective amount can be administered in one or more administrations.

[0501] As used herein, amelioration of the symptoms of a particular disease or disorder by a treatment, such as by administration of a pharmaceutical composition or other therapeutic, refers to any lessening, whether permanent or temporary, lasting, or transient, of the symptoms, that can be attributed to or associated with administration of the composition or therapeutic.

[0502] As used herein, a “prodrug” is a precursor or derivative form of a pharmaceutically active substance that is less cytotoxic to tumor cells compared to the parent drug and is capable of being enzymatically activated or converted into the more active parent form (see, e.g., Wilman, 1986, Biochemical Society Transactions, 615th Meeting Belfast, 14:375-382; and Stella et al., “Prodrugs: A Chemical Approach to Targeted Drug Delivery,” Directed Drug Delivery, Borchardt et al., (ed.), pp. 247-267, Humana Press, 1985).

[0503] As used herein, an “anti-cancer agent” refers to any agent that is destructive or toxic to malignant cells and tissues. For example, anti-cancer agents include agents that kill cancer cells or otherwise inhibit or impair the growth of tumors or cancer cells. Exemplary anti-cancer agents are chemotherapeutic agents.

[0504] As used herein, an “anti-angiogenic agent” or “angiogenesis inhibitor” is a compound that blocks, or interferes with, the development of blood vessels.

[0505] As used herein, a TNF-related or TNF-mediated disease refers to a disease, condition, or disorder in which TNFR1 or TNFR1 signaling plays a role in the etiology; included are diseases, disorders, and conditions in which inhibition of TNFR1 signaling can be ameliorative of a symptom of the disease, condition, or disorder.

[0506] For clarity of disclosure, and not by way of limitation, the detailed description is divided into the subsections that follow.

### B. OVERVIEW: PAN-CELL SURFACE RECEPTOR-SPECIFIC THERAPEUTICS AND COMPOSITIONS COMPRISING MIXTURES OF SPECIES THEREOF AND PROBLEMS WITH PRIOR PAN-CELL SURFACE RECEPTOR THERAPEUTICS AND SOLUTIONS PROVIDED HEREIN

[0507] Provided are mixtures of constructs, including chimeric polypeptide chains (referred to as chimeric polypeptides and/or chains or other such nomenclature that is apparent from the context). The mixtures are formulated as pharmaceutical compositions. Also provided are chains that have modified properties, such as increased affinity for a targeted ligand or receptor, and/or increased serum half-life. As discussed herein, prior art ligand trap and similar therapeutics have not been effective because of low affinity relative to targeted receptors or ligands, short half-lives, lack of specificity for targeted receptor or ligand, and other such deficiencies. As a result, they are ineffective as therapeutics, or, for therapeutic effect require dosages that are toxic or that result in adverse or undesirable side effects or other such problems. The pharmaceutical compositions provided herein, and variant component chains, address, and can solve these problems.

### 1. Pan-Cell Surface Receptor Specific Therapeutics

[0508] Receptor tyrosine kinases (RTKs) are a family of cell signaling molecules that are among the polypeptides involved in many signal transduction pathways. RTKs play a role in a variety of cellular processes, including embryogenesis, cell division, proliferation, differentiation, migration, and metabolism. RTKs can be activated by ligands. Such activation, in turn, usually results in receptor dimerization or oligomerization as a requirement for the subsequent activation of the signaling pathways. Activation of the signaling pathway, such as by triggering autocrine or paracrine cellular signaling pathways, for example, activation of second messengers, results in specific biological effects. Ligands for RTKs specifically bind to the cognate receptors.

[0509] RTKs also are involved in or play a role in disease processes, including cancer, autoimmune diseases, and other chronic diseases (see, e.g., Hynes et al. (2005) Nature Reviews Cancer 5:341-35). Cancers in which RTKs have been implicated include breast and colorectal cancers, gastric carcinomas, gliomas, and mesodermal-derived tumors. Dysregulation of RTKs has occurs in at least some cancers. For example, some breast cancers are associated with amplified expression of p185-HER2. RTKs also have been associated with diseases of the eye, including diabetic retinopathies and macular degeneration. RTKs also are associated with regulating pathways involved in angiogenesis, including physiologic and tumor blood vessel formation. RTKs also are implicated in the regulation of cell proliferation, migration, and survival.

[0510] Among the RTKs associated with disease is the HER (Human EGFR family, also referred to as the ErbB or EGFR) family of receptors (see, e.g., Hynes et al. (2005) Nature Reviews Cancer 5:341-354, for a discussion of their role cancer). These receptors, referred to as the Class I receptors, include HER1/EGFR, HER2, HER3 and HER4. Nomenclature varies: HER1 also is referred to as EGFR and ERBB1; HER2, also is referred to as ERBB2 and NEU; HER3 also is referred to ERBB3; and HER4 also is referred to as ERBB4. All members of this family have an extracellular ligand-binding region, a single membrane-spanning region, and a cytoplasmic tyrosine-kinase-containing domain. The HERs (EGFRS) are expressed in various tissues of epithelial, mesenchymal, and neuronal origin.

[0511] Under normal physiological conditions, activation of the HERs is controlled by the spatial and temporal expression of their ligands, which are members of the EGF family of growth factors. Ligand binding induces the formation of receptor homo- and heterodimers leading to activation of the intrinsic kinase domain, resulting in phosphorylation on specific tyrosine residues in the cytoplasmic tail, ultimately leading to activation of intracellular signaling pathways. Each of these receptors has been shown to have a role in cancer. For example, HER1 (ErbB1) and HER2 (ErbB2) have been implicated in the development and pathology of many human cancers; and alterations in these receptors have been associated with more aggressive disease and disease associated with poor clinical outcome.

[0512] Because of their roles in cancers and other diseases, HER receptors are therapeutic targets. There are two classes of anti-HER therapeutics: antibodies targeted to the extracellular (or ectodomain), referred to herein as the ECD, and small-molecule tyrosine kinase inhibitors. Anti-HER drugs exhibit limited efficacy and limited duration of response. For example, Trastuzumab (sold, for example under the trademark Herceptin®) is a humanized version of a murine monoclonal antibody, and targets the extracellular domain of HER2. Effectiveness requires high expression (at least 3- to 5-fold overexpression) of HER2. Consequently, fewer than 25% of breast cancer patients qualify for treatment. Among this population, a large proportion fail to respond to treatment (Piccart-Gebhart et al. 2005; Romond et al., 2005). In addition, small molecule tyrosine kinase inhibitors often lack specificity. Thus, with the exception of preselected highly expressing HER2 patients treated with Herceptin in combination with chemotherapy, the efficacy observed with single-targeted anti-HER agents, antibody or small molecule tyrosine kinase inhibitors, is in the range of 10-15%.

[0513] As known in the art, and described herein, members of the EFGR family (erb1/EFGR/IER1, erb2/HER2, erb3/HER3, and erb4/HER4) are composed of extracellular ligand binding domains. When ligands bind to these domains, receptor dimerization and autophosphorylation of intracellular tyrosine kinase domains occur. Autophosphorylation activates the downstream signaling pathways ras, raf, mitogen-activated protein kinase (MAPK), phosphatidylinositol 3-kinase (PI3K), Akt, and the signal transduction and activator of transcription (STAT) pathways. This downstream signaling leads to activation of cell growth, proliferation, and survival of cells. Binding of the EGFR by inhibitors leads to a disruption in proliferation resulting in apoptosis. Antibodies against the EGFR, HER2 and HER3 have therapeutic potential, but, with the exception of HER2, these receptors often are not overexpressed in cancer cells, although they are important to the molecular pathogenesis of disease. For example, when patients are treated with anti-EGFR antibodies, there are severe and dose-limiting side effects, thus diminishing their clinical utility and the same is true for small molecule inhibitors of the associated receptor tyrosine kinase of the EGFR.

[0514] This happens because effective concentrations of antibody that block receptor signaling do so equally on normal and diseased cells. HER2 is an exception because it is often overexpressed on malignant but not normal cell types. thus, it can be selectively targeted by antibody. Tyrosine kinase inhibitors have not been very successful in the treatment of HER2-associated diseases because of their off-target toxicities, for example, inhibition of non-targeted tyrosine kinases. Ligand-trapping of growth factors that selectively target diseased cells where normal cells lack a requirement for excess ligands has been applied to target VEGF/VEGR in cancer and ophthalmic disease (bevacizumab—anti-VEGF antibody and aflibercept—an Fc-mediated dimer of the VEGFR). But this approach had not been attempted in pursuit of the signaling pathways of the EGFR Family (EGFR, HER2, HER3, HER4). The ligand-trapping approach is more complicated for the EGFR family because there are 11 growth factors, plus splice variants, that can activate the four receptors. In addition, the functions of these growth factors can range from growth and differentiation of epithelial cells to the maintenance of neuronal cell plasticity. A new modality is needed that will target such diseased cells in a different way.

[0515] The first generation of such therapeutics targeting receptors were the single chain antibody constructs designed to bind to ligands; the next generations were the pan-Her constructs, described herein, that are heterodimers that contain different chains to bind to a plurality of ligands and/or receptors. A problem with these earlier generations of therapeutics, is that, except for HER2, the other family members are not overexpressed in disease states, and, thus, are difficult to effectively inhibit. The earlier generation constructs, including the pan-Her constructs, do not have sufficiently high affinity to be used as therapeutics. The required dosage to achieve sufficient therapeutic effect is too high. Antibodies against the EGFR, HER2 and HER3 have therapeutic potential, but, with the exception of HER2, against which antibodies have been used as therapeutics, these receptors are not often overexpressed in cancer cells, although they are important to the molecular pathogenesis of disease. For example, when patients are treated with anti-EGFR antibodies there are severe and dose-limiting side effects, thus diminishing their clinical utility and the same is true for small molecule inhibitors of the associated receptor tyrosine kinase of the EGFR (see, e.g., Hirandi et al. (2009) J Oncology Article ID 567486, doi.org/10.1155/2009/567486). This occurs because effective concentrations of antibody that block receptor signaling do so on normal and diseased cells equally. HER2 is an exception because it is often overexpressed on malignant but not normal cell types. Thus, it can be selectively targeted by antibody. Tyrosine kinase inhibitors have not been very successful in the treatment of HER2-associated diseases because of their off-target toxicities, such as by virtue of inhibition of non-targeted tyrosine kinases. Therefore, a new modality is needed that will target such diseased cells in a different way; and it is provided herein.

[0516] Provided herein are compositions that contain mixtures of homodimers and heterodimers that contain affinity optimized or enhanced receptor ECDs (oECDs), linked to multimerization domains, such Fc domains, and particularly Fc's modified to enhance half-life. The single chain constructs can be co-expressed in cells to produce mixtures of homodimers and heterodimers, which mixtures contain reproducible ratios of homodimers and heterodimers (or other products depending upon the single chains that are encoded). The homodimers and heterodimers each possess enhanced affinity or avidity for a target ligand, and, also optionally enhanced half-life, but the mixture of these homodimers and heterodimers, which can form higher order structures, have higher affinity/avidity than the isolated heterodimers (or homodimers). It has not heretofore been recognized that the mixture can be provided as the therapeutic. Prior to this, the heterodimers were isolated from the mixture to prepare the therapeutic. As described herein, the mixtures solve problems of the earlier generations. The mixtures are demonstrated herein for mixtures of HER1 and HER3 ECD/multimerization chains in homodimers and heterodimers. Mixtures of other chains that target other receptors or families of receptors are contemplated herein, because other such mixtures can provide ligand traps (oligo-traps) with higher affinity/avidity for targeted ligands/receptors to provide effective therapeutics.

[0517] Therapeutic products that interact with one or more, typically two or more, cell surface receptors or ligands, such as members of the HER family, particularly HER1, HER3 and HER4, insulin-like growth factor-1 receptors (IGF-1R or IGF1R), particularly IFG1R, and vascular endothelial cell growth factor receptor (VEGFR) family members have been developed (see, e.g., as US publication US20100055093A1). These therapeutics and candidate therapeutics act by specifically targeting at least one or more receptors and/or their ligands that cooperate in the activation of a disease pathway. Such therapeutics overcome or address problems associated with therapeutics targeted to a single receptor. For example, a problem with anti-HER drugs, such as Herceptin® (Trastuzumab), has been limited efficacy because HER2 overexpression, which occurs in only subset of breast cancers, and also limited duration of response because resistance develops to the drug can develop, such as by virtue of activity of other receptors. Similar problems are observed with drugs that target receptors other than HER family members. A mechanism for Herceptin® (Trastuzumab) resistance is co-expression of additional HER family members. Other mechanisms of resistance, include co-expression of the IGF-1R; metalloprotease-mediated activation of HER2 (by ‘clipping’ of the extracellular domain); and upregulation of the PI3K-AKT (phosphatidylinositol-3-kinase-Protein Kinase B) pathway, often mediated by loss of PTEN (phosphatase and tensin homology, which is mutated in cancers; see, e.g., Nahta et al. (2006) Cancer Lett. 8:123-38; Hynes et al. (2005) Nature Reviews Cancer 5:341-354). Mechanisms of resistance to HER1/EGFR therapeutics are similar to those for resistance to Herceptin® (Trastuzumab). Data show that 60% of patients (88/145 patients) express one or two HER family members; 18.6% (27/145) co-express three HER family members. The data also show that cumulative receptor expression predicts a much more severe disease (p<0.0001). Additional data indicate that about 40% of breast cancers co-express two HER family members. The frequency of co-expression of HER family members in other cancers is comparable to that in breast cancer, with up to about 50% of patients predicted to simultaneously express HERs, and thus can be resistant to single agent targeted therapeutics, perhaps as a result of the constitutive activation of AKT (protein kinase B) and other cell pathways that stimulate cell proliferation (Hynes et al. (2005) Nature Reviews Cancer 5:341-354). Simultaneous co-expression of HER family members also leads to induction of survivin (an anti-apoptotic factor; Xia et al., (2006) Oncogene 24:6213-6221) as well as mediating production of distinct growth factors important in tumor progression (e.g., vascular endothelial cell growth factor; VEGF).

[0518] Despite some success in commercialization of bispecific antibodies they are often difficult to manufacture, have the potential for treatment-limiting immunogenicity, and a less-than-desirable half-life in vivo. These issues are summarized (see e.g., Cohen et al. (2021) mABs 13:1, doi.org/10.1080/19420862.2021.1944017 in PMCID:PMC7193592). Despite these deficiencies, bimekizumab for example, a bispecific antibody that neutralizes interleukin 17A and 17F, has shown superiority to the established antibody, adalimumab (sold under the trademark Humira®) in treating psoriasis (Adams et al., (2020) Front Immunol 1: doi:10:3389/fimmu.2020.01894). This shows that that multispecific antibodies that can neutralize more than one soluble factor can be successful, despite associated deficiencies. A second example is Afasevikumab (also known as NI-1401) which is a bispecific antibody neutralizing IL-17A and IL-17F. Its development was stopped because of manufacturing difficulties.

[0519] For a monoclonal antibody, such as cetuximab (sold under the trademark Erbitux®), that targets a surface receptor that occurs at varying levels on normal and cancer cells dose limiting toxicity is common at less than optimally efficacious doses of antibody, due to inhibition of normal processes, such as turnover of the epidermal layer in the gut and skin which express higher levels of EGFR. This effect is enhanced by the ADCC activity mediated by cetuximab on cells that express an appreciable amount of EGFR (see, e.g., Cai et al. (July 2020) Front. Oncol. 24, doi.org/10.3389/fonc2020.01249; and Li et al. (2009) Targeted Oncology 4: 107-119 doi:10.1007/s 11523-009-0114-0).

[0520] When considering mechanisms of resistance to monoclonal antibodies like cetuximab (EGFR), or other members of the EGFR family (EGFR, HER2, HER3, HER4) a common mechanism is overexpression of the growth factors, such as TGF-alpha which is a cancer associated growth factor that activates the EGFR (Cai et al. (July 2020) Front. Oncol. 24, doi.org/10.3389/fonc2020.01249). Growth factor activation of other members of the EGFR family also can result in inhibition of the efficacy of anti-EGFR and anti-HER2 monoclonal antibodies (Luque-Cabal et al. (2016) Cin Med Insights Oncol. 10(Suppl 1):21-30, PMCID: PMC4811269). Alternative approaches for treatments of diseases, disorders, and conditions, such as cancer and autoimmune diseases, are needed.

[0521] It is concluded herein that resistance to any particular HER-directed therapeutic frequently is mediated through expression of other HER family members, or through expression of related receptor tyrosine kinases, such as the IGF1R, VEGFR, FGFR and others. For example, IGF-1R directly inhibits the activity of Trastuzumab (sold under the trademark Herceptin®) via heterodimerization with HER2 (Nahta et al. (2006) Cancer Lett. 8:123-38). In addition to co-overexpression, the frequency of overexpression of any particular HER family member varies among cancers. It is found herein that the most commonly overexpressed of the HER family are HER1 and HER3, and the least commonly overexpressed member is HER4; TGF-α is the most commonly expressed ligand (see, e.g., US publication US20100055093A1, which provides a table providing an estimated disease incidence and estimated distribution of overexpression frequencies of HER family).

[0522] Co-expression of HER family members, which results in lack of response, or in development of resistance through compensatory upregulation of alternative HER family members, creates a challenge for treatment. The observations that different HER family members contribute to tumor development and progression in an overlapping and synergistic fashion is recognized herein and exploited herein to provide therapeutics that can be designed to avoid the problems of resistance and that can be designed for particular tumors based upon receptor expression in the tumor. The therapeutics and candidate therapeutics provided herein address these problems, including those identified herein and others, by targeting at least one or more cell surface receptors, typically two or more cell surface receptors such as a plurality of HER family members, and/or HER family members and any other cell surface receptor that participates in or is involved in resistance to drugs targeted to a single cell surface receptor.

[0523] Based upon the structure, functioning and interaction of HER family members, as well as other cell surface receptors, described herein are a number of therapeutic loci for targeting and intervention. These include regions of the receptors involved in ligand binding and regions involved in receptor dimerization, and regions involved in tethering. These regions can be targeted in a plurality of receptors simultaneously so that one therapeutic interferes with ligand binding and/or receptor dimerization of two or more receptors.

[0524] Several approaches and therapeutic molecules have been developed (see, e.g., US publication US20100055093A1). A problem with these approaches and therapeutics is that because they require multimeric products, such as bi-specific heterodimers, they are prepared from mixtures of monomeric species that then are mixed, or mixed in cell cultures in which they are expressed, results in compositions that contain a mixture of species, such as heterodimers and homodimers from which the heteromultimer of interest must be isolated.

[0525] It is shown herein, however, that compositions that contain mixtures of the species can be used as the therapeutic, and that, this mixture can be more effective than the single heteromultimeric species previously used as the therapeutic. As discussed below, these mixtures solve problems observed with the earlier generations of products, such as the purified heteromultimers, in that, as a mixture, their avidity for ligands that they are designed to trap, is sufficient to compete with the cell surface receptors, and to trap the ligands to reduce or inhibit activation of the cell surface receptors.

[0526] Hence, provided are pharmaceutical compositions that contain the mixtures of the species produced by combining the monomeric species of the heteromultimer of interest. This can be applied to any therapeutic, particularly antibody or antibody-like therapeutics that contain at least bi-specific therapeutics that target two or more different receptors or ligands. This is exemplified with the pan cell surface specific therapeutics, such as those detailed and provided in US publication US20100055093A1, which disclosure is included herein.

[0527] Methods for targeting regions of receptors, including the domains responsible for dimerization, ligand binding, and/or tethering are provided. In particular, receptor dimerization is blocked by therapeutics that interact with a plurality of receptors. These therapeutics include compositions containing the mixture of heteromultimers and homomultimers as provided and described herein.

[0528] Also, provided are methods for producing the compositions that contain exemplary therapeutics that interact with targeted regions. For example, subdomains II and IV are targeted to interfere with receptor dimerization and or to stabilize or promote tethering. As a first step in these methods, peptides that bind specifically to DII and IV homologous regions are respectively identified, such as by phage display selection. Subsequently, high-affinity, suitable peptide pairs that bind D II and IV are identified and hetero-dimers are constructed using one of the available methods such as chemical synthesis or PEGylation. The identified high affinity hetero-dimeric peptides that bind DII and IV simultaneously may tightly hold the receptors in their auto-inhibited configuration. Additionally, the peptide binders selected can target the homologous regions in domain II and domain IV of HER family receptors. The peptides targeted using this method can cross-link interdomain regions (e.g., stabilize the DII/IV interaction) in tethered, inactive, HER family members; or can bind distinct sites, for example on DII of a single receptor, thereby sterically inhibiting its ability to dimerize.

[0529] Methods for targeting ligands with therapeutics that bind to a plurality of ligands are described. Receptor ligands can be screened to identify molecules that bind thereto. Heteromultimers containing two or more of such molecules can be produced. Methods for stabilizing the tethered conformation of the receptors are described. HER1, 3, and 4 exist in a tethered and open form. The tether is formed upon interaction of subdomains II and IV. In this form, the principal dimerization arm (in DII) is unable to interact with other receptors, and so cannot form receptor dimers or heterodimers. The HER receptors on the cell surfaces, except for HER2, which is constitutively ‘ready for dimerization’, are estimated to occur in the tethered form about 95% of the time on cells (even when stimulated with ligand). Stabilization of the tethered form of the receptor, so that it cannot assume an open configuration, inhibits receptor activity.

[0530] Therapeutics that target a plurality of receptors, particularly members of the HER family address one or all of the considerations and the problems noted above. Provided herein are compositions that contain Pan-cell surface receptor therapeutics, including pan-HER therapeutics, methods for making and using such therapeutics for treatment of diseases and disorders that involve the HER family of receptors and their ligands. Also described are methods for identifying Pan-Her therapeutic candidate molecule, and screening assays therefor. Such methods are described herein in Section L and in the Examples.

[0531] In some embodiments, the pan cell surface receptor-specific therapeutics in the compositions are designed to interact with ligands for one or more receptors and/or to interact with one or more receptors to modulate, generally inhibit, the activity of two more receptors. This is achieved by forming heteromultimers of two or more ECDs or fragments thereof from at least one HER and another RTK or other CSR, which may or may not be a member of the HER family. In particular, at least one of the ECDs is from a HER receptor and includes portions of at least domains I, II and III to permit ligand binding and dimerization with cell surface receptors. The heteromultimers typically are linked so that the dimerization domains are positioned for interaction with a cell surface receptor. Typically, the ECDs can include a multimerization domain that facilitates dimerization or multimerization of two or more ECDS. Included among the ECDS are hybrid ECDs that contain domains from two or more different receptors. At least one of the ECDs in the heteromultimer in these embodiments contains sufficient portions of domains I-III and, if needed, domain IV, such that the heteromultimer interacts with ligand and/or is available for dimerization with a cell surface receptor, such that the heteromultimer modulates the activity of at least two cell surface receptors. The at least two cell surface receptors generally include at least one HER receptor family member.

[0532] The Pan-Her therapeutics, which contain at least two ECDs or portions from two different HER family members, can block activity of two or more members of the HER family by attaching the extracellular domain portion of the receptors, such as those similar to Trastuzumab (sold under the trade name Herceptin®) and cetuximab (sold under the trade name Erbitux®), and/or by binding a ligand that activates one or more receptors. The Pan-Her therapeutics modulate the activity of two or more cell surface receptors, including at least one cell surface receptor that is a HER receptor.

[0533] The compositions also can contain multimers in which two or more of the ECDS are derived from the same HER receptor. In dimers of such multimers, the ECDS, however, contain different ECD portions.

[0534] Thus, the compositions and cell lines provided herein solve the problems detailed above. The approach herein of employing mixtures of species, not only can be used with extracellular domain:IgG Fc fusion proteins, but also with other bi-specific therapeutics. For example, the interleukins IL-17A, IL-17F cooperate with tumor necrosis factor-alpha (TNF-α) in inducing the production of key pro-inflammatory mediators (Chiricozzi et al. (2011) Invest Dermatol. 131(3):677-87,doi: 10.1038/jid.2010.340. Epub 2010 Nov. 18). An optimized oligo-trap (GFT), prepared as described herein, directed at these three cytokines provides a synergistic therapeutic effect, at the least similar, if not superior, to anti-IL17 and anti-TNF antibodies added together (see, e.g., Buckland et al. (2014) Nat Rev Rheumatol 10:699, doi.org/10.1038/nrrheum.2014.183, which describes that integrative responses to IL-17 and TNF-α in human keratinocytes account for key inflammatory pathogenic circuits in psoriasis).

[0535] Provided herein is an approach to accomplishing inhibition of cell surface receptors through the use of receptor extracellular domains, generally optimized to at least a 10-fold increase for binding their cognate ligands, and fused with multimerization domains, such as IgG Fe domains, where the receptor-fusion proteins as Fc-mediated dimers a mixture of homodimers (A and B), and AB heterodimers is obtained. As described and exemplified herein, the Fc domains can be modified to have altered properties/activities, particularly properties that increase the serum half-life of the therapeutics, and the ECD portions can be modified to increase affinity for their cognate receptors, and ECD portions to different receptors can be fused. The resulting mixture of product of multimers (heteromultimers and homomultimers) is or is formulated as the therapeutic product. It also is shown herein that stable mammalian cell lines, such as CHO cell lines, that produce these mixtures at stable and reproducible rations also are provided.

[0536] It is shown and described herein, that contrary to expectations of those of skill and greater skill in the art, these molecules can be expressed for many generations in a stable mixture with a stable ratio of products, and that the mixture is more active in vitro and in vivo than the heterodimer alone. This is exemplified with an EGFR (HER1):HER3 construct, it is applicable to other receptor-ligand associations.

[0537] Provided are mixtures that contain the products produced by expression of chimeric receptors (see, e.g., FIG. 3; referred to herein as oligobodies, GFT mixtures, and other terms as described, but all refer to the mixture of products upon expression of monomers, generally in a mammalian cell). Included are mixtures in which the extracellular domains of two different receptors, i.e., receptor 1 and 2 in the figure, are fused together, and the ECDs of two other receptors (or one in common with the first), i.e., receptor 3 and 4, are fused, and then the R1:R2 fused domains are fused with an IgG Fc domain, and the R3:R4 fused domains are fused with an IgF Fc domain, followed by co-expression in a single CHO cell. The resulting mixture of products is formulated as the therapeutic; or the chimeric heteromultimeric product is purified.

[0538] As described in the detailed description above, the human EGF receptor (EGFR or HER) family members cooperate in malignancy. Of these, HER2 does not bind growth factors and HER3 does not encode an active tyrosine kinase (see, e.g., FIG. 7, which describes the eleven (11) growth factors that initiate signaling in the four members of the EGFR family, the receptors, and signaling pathways).

[0539] As discussed in the detailed description, below, this diversity creates difficulty in creating receptor-targeted therapeutics for the HER family, and thus leads to pathways for resistance: Resistance results from a variety of factors including, but not limited to: 1) upregulation of the non-targeted receptors, resulting in increased ligand association and signaling; and 2) upregulation of growth factor expression, also resulting in increased signaling. Single amino acid changes in the EGFR and HER3 are identified that create high affinity sequestration of the cognate ligands and that can be used as receptor decoys to downregulate aberrant HER family activity. In silico modeling and high throughput mutagenesis were used to identify receptor mutants with very high ligand binding activity. A single mutation (T15S; EGFR subdomain I) enhanced affinity for EGF (2-fold), TGF-α (26-fold), and heparin-binding (HB)-EGF (6-fold). This indicates that T15 is an important negative regulatory amino acid for EGFR ligand binding. Another mutation (Y246A; HER 3 subdomain II) enhanced neuregulin (NRG)1-β binding 8-fold, probably by interfering with subdomain II-IV interactions. Further work revealed that the HER3 subunit of an EGFR:HER3 heterodimer suppresses EGFR ligand binding. Optimization required reversing this suppression by mutation of the EGFR tether domain (G564A; subdomain IV). This mutation resulted in enhanced ligand binding (EGF, 10-fold; TGF-α, 34-fold; HB-EGF, 17-fold; NRG1-β, 31-fold). This increased ligand binding was reflected in improved inhibition compared to the non-optimized heterodimer of in vitro tumor cell proliferation and tumor suppression in a xenograft model. When the optimized EGFR-Fc: HER3-Fc (oEGFR1: oHER3) are expressed in CHO cells both homodimers and heterodimers are produced in a stable ratio.

[0540] Attempts in to create mutations as described in the literature (see, e.g., Goulet et al. (2020) J Pharm Sci. 109(1):74-103, doi: 10.1016/j.xphs.2019.05.031; Epub 2019 Jun. 4. PMID: 31173761; PMCID: PMC6891151) to produce exclusively heterodimers failed with respect to efficiency because of structural interference from the receptor extracellular domains. Studies herein, see, e.g., Example 12, show that a mixture is more potent in assays than the purified oEGFR1:oHER3 heterodimer (o=optimized). While it is customary that biologic therapies with ONLY ‘singe peak’ homogeneity are developed to commercialization, the only requirement from a regulatory perspective is that the drug product should be reproducible. It is shown herein that the ratios of the products in the mixtures are reproducible.

[0541] Antibody mixtures have been produced, these include those in which each component is produced separately and then mixed together at a defined ratio (see, e.g., Markham (2021) Drugs 81:175-178, doi.org/10.1007/s40265-020-01452-3). This requires many extra steps as each component must be carefully characterized as if it were the final product, and then the produce isolated. As shown herein, when, for example, optimized receptor extracellular domain IgG Fc fusion proteins are co-expressed in CHO cells a stable mixture of homodimers and heterodimer is produced (Oligo-trap Technology), resulting a single product with three components to be purified in one step using an Fc-binding affinity column and customary polishing steps.

[0542] This same approach can be used with any bi-specific antibody or similar product, including any of the optimized extracellular domain:IgG Fc fusion proteins and other such products. For example, the interleukins IL-17A, IL-17F cooperate with tumor necrosis factor-α (TNF-α) in inducing the production of key pro-inflammatory mediators (Chiricozzi et al., (2011) Invest Dermatol. 131(3):677-87, doi: 10.1038/jid.2010.340. Epub 2010 Nov. 18). Using an optimized Oligo-trap directed at these three cytokines could provide a synergistic therapeutic effect, similar to anti-IL17 and anti-TNF antibodies added together (Buckland et al., (2014) Nat Rev Rheumatol 10:699, doi.org/10.1038/nrrheum.2014.183).

[0543] As detailed throughout this disclosure, early studies on Oligo-trap technology have been presented (see, e.g., Sarup et al. (2008) Mol Cancer Ther 7(10):3223-3236, which describes the non-optimized receptor: IgG Fc; and Jin et al., (2009) Mol Med 15:11-20, doi.org/10.2119/molmed.2008.00103, which describes the ligand-optimized EGFR:Fc and HER3:Fc fusion proteins, and data regarding the purified heterodimer and US publication US20100055093A1, and corresponding International PCT Publication No. WO2007/146959). None of these publications presents data or describes or suggests the concept of the Oligo-trap Technology, which encompasses the mixture of homodimeric and heterodimeric optimized ligand binding domains, or the concept of applying Oligo-trap Technology to other ligand-receptor systems.

[0544] The following sections describe problems solved by the instant methods and products, exemplary therapeutics, methods of making them, screening for them, and using them.

2. Problems with Prior Pan-Cell Surface Receptor Therapeutics and Solution Provided
a. Mechanism of Action of the Hermodulins that Contain a Modified ECD of an EGFR Family Member, Such as HER1 (EGFR1) or HER3, Linked to a Multimerization Domain, Such as an Fc, or a Modified Fc

[0545] As depicted in FIGS. 12A and 12B, functioning of the EGF receptor family is dependent upon dimerization, and ultimately, multimerization at the cell surface. The EGFRs, HER3 and HER4 are ligand dependent for this process; HER2 retains a perpetually active configuration. The change in conformation of the EGFR before and after binding EGF (or one of its other ligands) is shown in FIGS. 12A and 12B. FIG. 12B shows a complex of ligand bound receptors on the cell surface.

[0546] Ligand-trapping of growth factors that are overexpressed by diseased cells can selectively target the diseased cells because normal cells lack a requirement for excess ligands. It has been applied with respect to the VEGF/VEGFR. The ligand-trapping approach is more complicated for the EGFR family (EGFR, HER2, HER3, HER4). In the EGFR family, there are 11 growth factors, plus splice variants, that can activate the four receptors. In addition, the functions of these growth factors can range from growth and differentiation of epithelial cells to the maintenance of neuronal cell plasticity. For the HER family in cancer, see, Sermina (2007) Trends Molec. Med.13:527-534, doi.org/10.1016%2Fj.molmed.2007.10.002; for the HER4 family in cardiomyocyte and cardiac maintenance, see, e.g., Wadugu (2012) Amer. J. Physiol. 302: H2139-H2147, doi.org/10.1152/ajpheart.00063.2012 (cardiac stem cells); for HER4 as an oncogene or a tumor suppressor. Eleven (11) ligand/growth factor families activate the HER Family. EGF, TGF-alpha, AREG, EPGN are specific for the EGFR, while HB-EGF, EREG, and BTC activate both the EGFR and HER4; NRG-1, 2 activate HER3 and NRG-3,4 activate HER4. HER4 is distinct from the other receptors in that it has important roles in cardiomyocyte survival, neuronal maintenance, and has been characterized as an oncogene and a tumor suppressor gene.

b. Problems with Prior Pan-Cell Surface Receptor Therapeutics and Solutions Provided Herein

[0547] As detailed and shown herein, an effective ligand trap composed of the extracellular domain of a receptor fused to a half-life extender must have about the same or better ligand affinity than the cell membrane-associated receptor in order for it to effectively compete with the receptor for ligands. The extracellular domains of many cytokine receptors retain high affinity for their cognate ligands, exemplified by etanercept (Fc-mediated dimer of TNFR2) and rilonacept (Fc-mediated dimer of the IL1R). The extracellular domains of the EGFR family lose most of their affinity when not part of the intact transmembrane receptor (see, e.g., acrobat.adobe.com/link/track?uri=urn:aaid:scds:US:bOOb97fa-b7d0-3ac7-b436-01cf5b320752). Thus, there are several problems to be solved for developing effective therapeutics that inhibit or target the EGFR family These include the following:
[0548] 1) Antibodies binding the EGFR or HER3 have too much toxicity because overexpression of these receptors is not common in tumors. Thus, a ligand trap is a much better alternative since it can remove excess ligand, not needed by normal cells, while but will deprive of the excess ligand needed for growth of the diseased cells.
[0549] 2) Because of the diversity of biological functions of HER family members, a ligand trap must be designed that preserves the function of HER4 to avoid toxicities associated with neurological degradation or cardiac function.
[0550] 3) Extracellular domains of HER family members have lost high-affinity binding of ligands. Thus, such molecules could not perform well as ligand traps.

[0551] As described and shown herein, the mixtures provided herein solve these problems, a mixture of homodimers and heterodimers and other higher order structures that may form, results in high affinity structures that mimic the structures of the receptors on the cell surface for trapping ligand. With respect to the EGFR family in particular, as shown herein, the combinations of the EGFR:Fc and HER3:Fc, does not trap NRG3 and NRG4, which are specific for HER4 function in neurogenesis and cardiac function. Additionally, as described the constructs comprise high-affinity extracellular domains using in-silico design and high-throughput mutagenesis. Various exemplary mutations for each ECD are provided. Additionally, half-life of the constructs has been extended by modifying the multimerization domain, such as the Fc domains. These principles, ECD design, linkage to modified multimerization domains, and therapeutics that contain mixtures of multimers can be applied to other receptor families to produce effective therapeutics. Hence, provided herein, are pharmaceutical compositions that comprise mixtures of heterodimers and homodimers, and other multimer, and higher order structures, for use for treating diseases, disorders, and conditions in which receptors play a role in the etiology of a disease, disorder, or condition, and in which trapping ligands can treat the disease, disorder, or condition.

[0552] As detailed herein, next generation therapeutics that interfere with receptor activation by virtue of high avidity for ligands are provided. This next generation of therapeutics comprising mixtures of various multimers of constructs comprising modified ECDs of targeted receptors and multimerization domains.

[0553] The mechanism of action of the exemplary component chains in the heterodimer/homodimer constructs provided herein is depicted in FIGS. 13A-C. The domains I-V of the EGFR ECD are depicted in the figure. The first depiction in the figure, FIG. 13A, shows a model of wild-type EGFR, HER3, extracellular domain in resting (‘tucked and tethered’) conformation. This conformation prevents ligand binding and receptor homodimerization, dimerization and multimerization with themselves or with each other (EGFR, HER2, HER3, HER4). The domain II, discussed in more detail below, tether ‘nose’ associates with Domain IV which prevents the receptor from interacting with other receptors or with ligands. Mutations are introduced to alter the conformation. Mutations introduced into the ECD, as detailed herein. Mutations are introduced into the ECD to increase affinity to ligands, and the ECD is linked to a multimerization domain. This is shown in the figure for HER1 and HER3.

[0554] In the next depiction in the figure, FIG. 13B, the ECD, a HER1 (EGFR) ECD is depicted as a single chain comprising the EGFR ECD linked to an Fc (an IgG1 Fc), and containing mutations, such as T15S in domain I, and G564S in domain IV. The domain I mutation, such as T15S, is selected to partially inhibit the “tuck and tether” interaction with domain IV. The domain IV mutation, such as G564S further prevents interaction between domain IV and domains 1 and 2, thereby resulting in “open” conformation. In the next depiction, FIG. 13C, the ECD of HER3 containing a mutation (a “tip of the nose” mutation in the tether domain) in domain II, such as T264A, which causes the chain to unfold.

[0555] In more detail, in the HER1 ECD-containing chain, the domain I T15S mutation partially inhibits interaction of DI, II ‘tuck and tether’ with domain IV. The domain IV (G564S) mutation further prevents interactions between domains I and II with domain IV. The HER3-ECD containing chain includes a single ‘tip of the nose’ (tether domain) mutation in Domain II (Y246A), which causes the chain to unfold, making it better able to bind ligand and multimerize. The untucked and untethered forms of EGFR-Fc and HER3-Fc capture soluble ligands for these receptors, thereby starving diseased cells. The single chains multimerize into higher order structures.

[0556] FIG. 11 depicts the structure of a back-to-back exemplary heterodimer between the optimized EGFR ECD and optimized HER3 ECD. These structural features are present in all members of the EGFR family and allow homodimerization and heterodimerization. L1=Domain 1, CR1=Domain 2, L2=Domain 3. EGFR mutations T15S and G564S; and HER3 mutation Y246A also are shown. The open configuration occurs when these mutations are present; the resulting constructs in the open configuration that can form the homodimers and heterodimers and other higher order structures in mixtures of these chains (or as produced from cell lines that co-express the constructs).

[0557] As described and shown herein, and discussed below, these constructs, the modified ECDs linked to Fcs, multimerize and form high order complexes provided as mixtures, increases their avidity for corresponding growth factors (ligands), thus making them more effective therapeutics. The multimers include homodimeric forms of EGFR-Fc, HER3-Fc; heterodimeric EGFR-Fc.HER3-Fc, and super-complexes of all three isomers via the tether domain and leucine zippers in Domains I and III. These higher order structures can compete with and/or out compete the cell surface receptors for ligand binding. By tying up ligands in the multimer mixtures, the receptors cannot activate signaling pathways in cells, such as tumor cells, that express these receptors.

### C. HER RECEPTOR AND OTHER CELL SURFACE RECEPTOR STRUCTURES AND ACTIVITIES

[0558] Provided herein are compositions, also referred to as oligoclonal antibodies, reflecting the mixture of the components. The compositions contain mixtures of species of multimeric products, such as the “growth factor ligand traps” (GFTs; also referred to as oligo-traps, or mixtures of pan cell surface receptor traps) GFTs, that form when mixtures of monomers, containing an ECD linked to multimerization domain, and optionally a linker, are combined or co-expressed in a cell. The compositions contain mixtures of homomultimers and heteromultimers, which can form higher order structures, and can be used or formulated as therapeutic pharmaceuticals, such as a pharmaceutical composition containing the mixture in a pharmaceutically acceptable vehicle or carrier. These mixtures provide high affinity constructs for trapping ligands to thereby inhibit or prevent the activity or activities or signaling of receptors on cells associated with a disease, disorder, or condition. The pharmaceutical compositions and mixtures are used to treat diseases, disorders, and conditions that are treated by the purified heteromultimer. As shown herein, these compositions generally are more therapeutically effective than the purified heteromultimeric therapeutic. Exemplary of the heteromultimers in the mixtures provided herein are the pan-HER therapeutics, such as those described in US20100055093A1, corresponding International PCT Publication No. WO2007/146959, and detailed herein. This section describes the components of these heteromultimers and properties thereof. Provided herein are multimers that contain ECDs from different cell surface receptors, including members of the HER family of receptors. The multimers include combinations of receptor domains and subdomains linked to multimerization domains. To design such ECD multimers as provided herein, an appreciation of the receptor structure and function is advantageous. In particular, as detailed in the examples, the ECDs were screened by in silico and in vitro screening to identify mutations that result in a configuration that increases ligand affinity, particularly when the constructs are used as mixtures, which contain homodimers, heterodimers, and other higher structures thereof. The instant disclosure describes improvements to the component chains in the constructs and mixture to increase affinity and to increase half-life. This section provides description of members of the EGFR family and signaling pathways.

[0559] The receptor tyrosine kinases are a large family of cell signaling molecules that participate in embryogenesis, cell growth and differentiation, and in several disease processes, including diseases as diverse as cancer, autoimmune disorders, and other chronic human diseases (reviewed in Hynes and Lane (2005) Nat Rev Cancer 5: 341-54). The best characterized of these is the human EGF Receptor family (HER) of receptor tyrosine kinases. These are referred to as the Class I receptors. The HER family of receptors belong to the receptor tyrosine kinase (RTK) family, and possess protein tyrosine kinase activity (except for HER3; for reviews, see, e.g., Jorissen et al. (2003) Exptl. Cell Res. 284:31-53; Dawson et al., (2005) Mol. Cell Biol. 25:7734-7742, which sets forth nomenclature used herein; and Bazley et al. (2005) Endocrine-Related Cancer 12:S17-S27). There are four receptor genes that encode HER family members: the HER1 (EGFR or ErbB1), HER2 (or c-erbB-2 or ErbB2 or NEU), HER3 (c-erbB3 or ErbB3) and HER4 (c-erbB4 or ErbB4). The encoding genes can be alternatively spliced to produce a number of variants, including truncated variants, and variants that are intron fusion proteins. Some of the receptors play a role in normal development, differentiation, migration, wound healing, and apoptosis, which are essential activities. Aberrant function and activity play a role in a variety of disease states, including cancers.

[0560] Sequences of exemplary human HER family receptors are set forth in SEQ ID NOs: 2 (HER1), 4 (HER2), 6 (HER3), and 8 (HER4) and are encoded by a sequence of nucleotides set forth in SEQ ID NOs: 1, 3, 5, and 7, respectively. Typically, encoded HER polypeptides undergo posttranslational processing to yield a mature polypeptide lacking a signal sequence. Variants of the HER1 and HER3 ECDs with increased ligand affinity also are provided herein and described in the Examples.

[0561] Amino acid sequences of mature full-length polypeptides are depicted and described in FIGS. 2(A)-(D) and the respective figure legend. For purposes herein, numbering of amino acids in describing exemplary HER family receptors, ECD portions thereof, or ECD isoforms are with respect to the numbering of the mature polypeptide, unless specified otherwise. In addition, the amino acid positions used to describe domain organizations are for illustrative purposes and are not meant to limit the scope of the embodiments provided. It is understood that polypeptides and the description of domains thereof are theoretically derived based on homology analysis and alignments with similar receptors. Thus, the exact locus can vary, and is not necessarily the same for each receptor.

[0562] As set forth in FIG. 1, each member of the HER family shares a common domain organization including an extracellular domain portion (ECD or ectodomain or extracellular domain) of about 620 amino acids, a transmembrane domain, and a cytoplasmic tyrosine kinase domain. The ECD portion exhibits four subdomains designated I (L1), II (S1), III (L2), and IV (S2). Sequence identity among the full-length HER family varies from 37% for HER1 (EGFR) and HER3 to 49% for HER1 and HER2, with varying degrees of sequence identity among each domain. For example, the tyrosine kinase domains have the highest sequence identity (about 59-81%), and the carboxy terminal domain as the lowest identity (about 12-31%). Within the ECD domain, subdomains I and III share approximately 37% sequence identity and domains II and IV are homologous and share about 17% sequence identity (Ferguson et al. (2003) Mol. Cell, 11:507-517).

[0563] Subdomains I and III also are referred to as L domains, and constitute the bi-lobal ligand binding site. Domains I (1) and III (3) of the HER family previously referred to as L1 and L2, because they are leucine-rich domains that can act as leucine zippers. Leucine zippers occur in proteins that associate with each other. The polypeptide segments containing these periodic arrays of leucine residues exist in an alpha-helical conformation and the leucine side chains from one alpha helix interdigitate with those from the alpha helix of a second polypeptide, facilitating dimerization. In HER family members, the leucine zippers facilitate back-to-back dimerization of receptors (see, e.g., FIG. 11 and related discussions herein), but only if the receptors are in an open confirmation.

[0564] As described and shown herein, the open configuration can be achieved when the receptors are ligand-bound and for receptors that have the EGFR extracellular domains (ECDs) with mutations, such as T15S and G564S in HER and/Y246A in HER3, or other such mutations that optimize or enhance affinity for targeted ligands (described and exemplified herein, see, e.g., FIG. 11). Thus, the mutant EGFR ECD (including constructs herein) can dimerize with other receptors of the HER3 family via L1 and L2 or in the back-to-back configuration shown, for example, in FIG. 11. These structural features are shared by all four members of the EGFR family (EGFR, HER2-4), and the in heterodimers and homodimers in the mixtures herein that contain modified ECDs with the replacements, thus, contributing to the resulting increased avidity or affinity for targeted ligands in the mixtures of the heterodimers and homodimers.

[0565] Subdomains II and IV also are referred to as S domains or cysteine rich (CR) domains (also called furin-like repeat domains), and constitute a cysteine rich region. The Cys rich region is composed of a succession of small disulfide-bonded modules, which form a rod-shaped structure. Two types of disulfide-bonded modules are seen in each domain: a C1 disulfide bond where a single disulfide bond constrains an intervening bow-like loop, and a C2 disulfide bond where two disulfide bonds link four successive cysteines in the pattern Cys1-Cys3 and Cys2-Cys4 to give a knot-like structure (Ferguson et al., (2003) Molecular Cell 11:507-517). Domain II contains three consecutive C2 modules followed by five C1 modules, while domain IV contains seven modules where the first two are C1 modules, followed by a C2 module, two C1 modules, and another C2 module.

[0566] In general, domains II and IV mediate intramolecular and intermolecular contact of the HER structure. For example, intramolecular interactions occur between subdomains I and IV in a process referred to as “tethering”, where a j-loop projects from the fifth Cys rich module (see FIG. 1). This loop interacts with equivalent but smaller loops from module 5 and module 6 in domain IV. Interaction of domains II and IV further is stabilized by hydrogen bonds between the two regions, as well as by the contributions of carbohydrate. In addition, a side chain of an amino acid residue corresponding to Y246 in domain II of HER1 makes hydrogen bonds with the side chains of amino acid residues corresponding to D563 and K585 in domain IV. Corresponding amino acid residues in the ECD of mature HER family receptors important in mediating contacts between domains II/IV are set forth in Table 6. Interactions between domains II and IV are not present in HER2, in part due to the presence of non-conserved amino acid residues as compared to other HER family members (i.e., residues in the Table below)

TABLE 6

Domain II/IV Contact Residues

| | HER1 | HER2 | HER3 | HER4 |
|---|---|---|---|---|
| Domain II | Tyr246 | Tyr252 | Tyr246 | Tyr243 |
| | Tyr251 | Phe257 | Phe251 | Phe248 |
| | Gln252 | Glu258 | Gln252 | Gln249 |
| Domain IV | Asp563 | Asp570 | Asp562 | Asp560 |
| | Gly564 | Pro571 | Gly563 | Gly561 |
| | His566 | Phe573 | His565 | Gly563 |
| | Lys585 | Lys593 | Lys585 | Lys581 |

[0567] Intermolecular interactions also occur and allow for receptor-receptor interactions that are necessary for homo- and heterodimerization characteristic of active HER receptors. In fact, the same loop in module 5 of domain II described above that mediates tethering also is responsible for dimerization. This loop is often termed the “dimerization arm.” The amino acid residue corresponding to Y246 also facilitates intermolecular interactions required for dimerization.

[0568] HER family receptors further include a transmembrane (TM) domain (variably reported as beginning at residues 621, 622 or 626-644 or 647) and a cytoplasmic domain. The transmembrane domain spans the plasma membrane anchoring the receptor and generally includes hydrophobic residues. Typically, the residues that make up a transmembrane domain form an a-helix.

[0569] The juxtamembrane (JM) domain, which is the region located between the transmembrane and kinase domains, serves a variety of regulatory functions, such as for example, downregulation and ligand-dependent internalization events, basolateral sorting such as for example of EGFR in polarized cells, and association with proteins such as eps8 and calmodulin. In addition, the JM domain plays a role in receptor trafficking and is required (along with the transmembrane domain) for targeting EGFR to caveolae.

[0570] The tyrosine kinase domain is a conserved catalytic core common to receptor tyrosine kinases (RTKs) and is responsible for mediating transphosphorylation of carboxy-terminal tyrosine residues present in the carboxy-terminal domain. Activation of the tyrosine kinase domain occurs upon a conformational change induced upon binding of ligand to the receptor.

[0571] The carboxy-terminal (CT) domain contains tyrosine residues where phosphorylation modulates signal transduction. The tyrosine residues and nearby amino acids of each HER family member interact with a diverse set of second messengers to regulate specific biological and biochemical responses. For example, second messengers containing, for example, an SH2 (src homology-2) structure or a PTB domain recognize the phosphorylation “docking sites” and interact with the receptors to transmit the signal received at the receptor to either the cytoplasm or nucleus via interactions with other signaling components. There also are several serine/threonine residues where phosphorylation thereof affects receptor downregulation and endocytosis processes. Residues 984-996 in the C-terminus of EGFR (FIG. 1) serve as a binding site for actin and are involved in the formation of higher order receptor oligomers and/or receptor clustering after ligand activation of the kinase domain.

### 1. HER1 ECD Structure and Domain Organization

[0572] The domain organization of a full-length mature ECD and of various HER1 ECD isoforms is depicted in FIG. 2(A) (see, e.g., SEQ ID NOs: 1 and 2). The extracellular portion of HER1 includes residues 1-621 of a mature HER1 receptor and contains subdomains I (amino acid residues 1-165), II (amino acid residues 166-313), III (amino acid residues 314-481), and IV (amino acid residues 482-621). The I, II, and III domains of HER1 have structural and sequence homology to the first three domains of the type I insulin-like growth factor receptor (IGF-1R, see e.g., Garret et al., (2002) Cell, 110:763-773). Similar to IGF-1R, the L domains (i.e., domains I and III) have a structure of a six turn R helix capped at each end by a helix and a disulfide bond. As compared to IGF-1R, the HER1 sequence includes amino acid insertions that contribute to biochemical structures important for mediating ligand binding by HER1. Among these include a V-shaped excursion (residues 8-18), which sits over the large R sheet of domain I to form a major part of the ligand binding interface. In domain III, a corresponding region forms a loop (residues 316-326) that also is involved in ligand binding. A third insert region present in domain III (residues 351-369) is an extra loop in the second turn of domain III. This loop is the epitope for various antibodies that prevent ligand binding (i.e., LA22, LA58, and LA90, see e.g., Wu et al., (1989) J Biol Chem., 264:17469-17475). In addition, other loops in the fourth turn of the β helix solenoid are involved in ligand binding.

[0573] TGF-α, a ligand for HER1, interacts with the large R sheets of both the L domains I and III of one receptor molecule. Similarly, the ligand EGF also interacts with both domains I and III of HER1, although the interaction of EGF with domain III is considered to be the major binding site for EGF (Kim et al., (2002) FEBS, 269: 2323-2329). Cross-linking studies have determined that the N- and C-terminal portions of the EGF ligand interact with domains I and III, respectively, of the HER1 receptor. Amino acid Gly441 in domain III, corresponding to mature full-length HER1, is involved in mediating binding to EGF via interaction with Arg45 of human EGF. A 40 kDa fragment of HER1 of 202 amino acids (corresponding to amino acids 302-503 of a mature HER1 polypeptide) is sufficient to retain full ligand-binding capacity of HER1 to EGF. This 202 amino acid portion contains all of domain III, and only a few residues each of domain II and domain IV (Kohda et al., (1993) JBC 268: 1976).

[0574] Domain II of EGFR contains eight disulfide-bonded modules. Domain II interacts with both domains I and III. The contacts with domain III occur via modules 6 and 7, while modules 7 and 8 have a degree of flexibility thereby functioning to create a hinge in the ligand-free form of the EGFR molecule. A large-ordered loop is formed from module 5 of domain II and projects directly away from the ligand binding site. This loop corresponds to residues 240-260 (also described as residues 242-259) and contains an antiparallel β-ribbon. The loop (also called the dimerization arm) is important in mediating intramolecular interactions as well as mediating receptor-receptor contacts. In the inactive or “tethered” conformation of HER1, the loop contributes to intramolecular interactions by inserting between similar loop structures in modules 5 and 6 corresponding to amino acids 561-569 and 572-585, respectively, of a mature full-length ECD (see FIG. 1). Amino acid residues that contribute to the domain II/IV interaction are set forth in Table 6 above.

[0575] Deletion of the domain II loop abolishes the ability of the HER1 ECD to dimerize, thus showing its importance in facilitating intermolecular interactions. Dimerization is mediated by projection of the loop out across domain II of a second HER molecule in a space between domain I, II, and III. For example, contact is made by residues 244-253 of the dimerization arm with residues 229-239, 262-278, and 282-288 on the concave face of domain II in a second HER molecule. Tyr246 in domain II makes hydrogen bonds with Gly264 and Cys283 residues in a second HER molecule, and the phenyl rings of Tyr246 also interacts with Ser262 and Ser282 of an adjacent molecule. Other amino acid contacts between domain II of an EGFR and another HER molecule include Tyr251 with Phe263, Gly264, Tyr275, and Arg285; Pro248 with Phe230 and Ala265; Met253 with Thr278; and Tyr251 with Arg285. In addition, Asn247 and Asn256 are important for maintaining the loop in the appropriate conformation. Most all of these residues are conserved among HER family members and function similarly between HER family receptors. Further, proline residues occur in the loop in HER family receptors at any one of positions 243, 248, 255, and 257, with HER3 containing three prolines. The proline residues stabilize the conformation of the loop further. For example, HER1 contains prolines at position 248 and 257.

[0576] In addition to the involvement of domain IV (modules 5 and 6) in tethering of an inactive HER1 molecule, at least part of module 1 of domain IV of HER1 also appears to be required to maintain the structural integrity of an active HER1 molecule. For example, as mentioned above, a 40 kDa proteolytic fragment of HER1 containing all of domain III and part of domains II and IV retains full-ligand binding ability. The portion of domain IV present in this molecule corresponds to amino acids 482-503, including all of module 1. The amino acid corresponding to Trp492 in a mature HER1 molecule plays a role in maintaining stability of the HER1 molecule by interacting with a hydrophobic pocket in domain III. A recombinant molecule of HER1 containing all of domains I, II, and III but lacking all of domain IV is unable to bind ligand (corresponding to amino acids 1-476 of a mature HER1, see e.g., Elleman et al. (2001) Biochemistry 40:8930-8939). Thus, at least all or a portion of module 1 of domain IV is required for the ligand binding ability of HER1. The remainder of domain IV is expendable for ligand binding and signaling. For example, normal ligand binding and signaling properties of HER1 is present in a HER1 molecule missing residues 521-603 of a mature HER1 polypeptide.

### 2. HER2 ECD Structure and Domain Organization

[0577] The domain organization of a full-length mature HER2 ECD and various HER2 ECD isoforms is depicted in FIG. 2(B). The extracellular portion of HER2 includes residues 1-628 of a mature HER2 receptor and contains subdomains I (amino acid residues 1-172), II (amino acid residues 173-319), III (amino acid residues (320-488), and IV (amino acid residues 489-628). Despite having a similar domain organization, analysis of the crystal structure of HER2 has shown that HER2 does not possess the same intramolecular interactions that are characteristic of the “tethered”, inactive structure of the other HER family members. In other words, the loop in module 5 of domain II does not interact with residues of domain IV. Table 6 above depicts amino acids that mediate contacts between domains II/IV among HER family receptors, and sets forth those that are not conserved in HER2. For example, the Gly residue conserved at position 564, 563, and 561 of HER1, HER3, and HER4, respectively, is replaced by a proline in HER2. This proline residue sterically inhibits the interactions observed among the other HER family receptors (i.e., the Gly residue interacts with the corresponding HER3 amino acid Phe251). Consequently, due to sequence differences, HER2 does not exist in a “tethered”, inactive state, but constitutively exists in an active conformation, with its dimerization arm in domain II exposed.

[0578] The domain II dimerization arm, while having only 33-44% sequence homology among HER family receptors, is functionally highly conserved among all HER family receptors, including HER2. In HER2, this dimerization arm corresponds to amino acid residues 246-267 of mature HER2. Since HER2 is always present in an active, non-tethered conformation with its dimerization arm exposed, HER2 is the preferred heterodimerization partner for the other HER family members. HER2, however, does not form homodimers. The inability to form homodimers appears to be due to electrostatic repulsion, as the dimerization arm of HER2 and the pocket to which the dimerization arm makes contact in HER2 are both electronegative. The high electronegativity of HER2 can be accounted for by the greater number of acidic and basic residues in HER2 compared to the other HER family members. When HER2 is overexpressed in cells, however, it is able to homodimerize. The homodimerization observed upon overexpression involves a hydrophobic region in the carboxy terminal domain of HER2, particularly for ligand independent multimerization observed upon overexpression of the receptor (Garret et al. (2003) Mol. Cell, 11; 495-505).

[0579] Unlike other HER family receptors, HER2 does not bind to ligand. One reason for the inability to bind ligand is the close proximity and relative orientation of the ligand binding domains I and III. In HER2, the opposing domains I and III make substantial direct contact with each other. In this conformation, a ligand is unable to bind to any potential binding site because each binding site is occluded by the opposing ligand binding domain (Garret et al., (2003) Molecular Cell, 11:495-505). In addition, compared to other HER family members, HER2 contains sequence differences in the ligand binding interface of domains I and III that can inhibit ligand interaction. For example, Arg12 (corresponding to Thr15 in HER1, Ser18 in HER3, and Ser12 in HER4) and Prol4 (corresponding to Leu17 in HER1, Thr20 in HER3, and Leu14 in HER4) are different than the corresponding residues at the equivalent positions in the other HER family members. These residues are part of the V-shaped excursion which forms an extended β sheet with the ligand, and interfere with the ability of HER2 to bind ligands. Other sequence differences in domains I and III also can account for the inability of HER2 to bind to ligands.

### 3. HER3 ECD Structure and Domain Organization

[0580] The domain organization of a full-length mature HER3 ECD and various HER3 ECD isoforms is depicted in FIG. 2(C) (see, e.g., SEQ ID NOs: 5 and 6). The extracellular portion of HER3 includes residues 1-621 of a mature HER3 receptor and contains subdomains I (amino acid residues 1-166), II (amino acid residues 167-311), III (amino acid residues (312-480), and IV (amino acid residues 481-621). Like other HER family receptors, the structure of domains I, II, and III of HER3 can be superimposed with IGF-1R, and exhibit many of the same structural features as other HER receptors. For example, domains I and III of HER3 exhibit a β-helical structure, interrupted by extended repeats of disulfide-containing modules. A high degree of interdomain flexibility exists between domains II and III, not exhibited by IGF-1R. In addition, HER3 exhibits the characteristic β-hairpin loop or dimerization arm in domain II (corresponding to amino acids 242-259 of HER3). The β-hairpin loop provides for an intramolecular contact with conserved residues in domain IV resulting in a closed, or inactive HER3 structure. The residues important in this tethering interaction are set forth in Table 6 above, and include interaction of Y246 with D562 and K583, F251 with G563, and Q252 with H565. Upon binding of ligand, a conformational change reorients domains I and III exposing the dimerization arm from the tethered structure to allow for receptor dimerization.

[0581] Unlike other HER family receptors, HER3 does not have a functional kinase domain. Alterations of four amino acid residues in the kinase region that are otherwise conserved among all protein tyrosine kinases render the HER3 kinase dysfunctional. HER3, however, retains tyrosine residues in its carboxy terminal domain and is capable of inducing cellular signaling upon appropriate activation and transphosphorylation. Thus, homodimers of HER3 cannot support linear signaling. The preferential dimerization partner for HER3 is HER2.

### 4. HER4 ECD Structure and Domain Organization

[0582] The domain organization of a full-length mature HER4 ECD and various HER4 ECD isoforms is depicted in FIG. 2(D). The extracellular portion of HER4 includes residues 1-625 of a mature HER4 receptor and contains subdomains I (amino acid residues 1-163), II (amino acid residues 164-308), III (amino acid residues (309-477), and IV (amino acid residues 478-625). HER4 most closely resembles HER1 in that, like HER1, HER4 both is able to bind ligand and exhibit kinase activity. The domain organization, including the presence of the dimerization arm important for both tethering and dimerization is present in HER4. Table 6 above outlines the conserved residues in domain II and IV that lock the HER4 in an inactive state. The corresponding dimerization arm in HER1 corresponds to amino acid residues 237-258 of HER4. Of the ligand binding domains I and III, domain I is the principle domain responsible for the binding of the ligand neuregulin (NRG) to HER4. Domain I of HER4 recognizes N-terminal residues of NRG (Kim et al., (2002) Eur. J. Biochem 269:2323-2329).

[0583] The full-length HER4 receptor is expressed as four alternatively spliced isoforms. Two of the alternative spliced isoforms differ within the cytoplasmic tail (i.e., CYT-1 and CYT-2), and the other two differ within the juxtamembrane region (i.e., JM-a and JM-b). The result of the alternatively splicing is the generation of isoforms with different signaling capacities. For example, the CYT-1 isoform contains an additional exon that contains additional docking sites (i.e., SH2) for signaling molecules not present in the CYT-2 isoform. In addition, the JM isoforms differ in their sensitivity to proteinase cleavage, such as for example, by tumor necrosis factor-a converting enzyme (TACE).

### 5. HER Family Ligands, Ligand Specificity, and Ligand-Mediated Receptor Activation

[0584] Activity of members of the ErbB (HER) family of receptors requires ligand binding for dimerization, which leads to catalytic activity ultimately resulting in signal transduction. There are several HER-specific ligands that each belong to the EGF family of ligands (see e.g., Table 7). All EGF ligands have an EGF-like domain, which is a 45-55 amino acid motif with six cysteines that interact to form three loops covalently associated by disulfide bonds. This region is important for conferring binding specificity of the HER ligands. Additional structural motifs in EGF ligands include immunoglobulin-like domains, heparin-binding sites, and glycosylation sites. Generally, the ligands are initially expressed as membrane-anchored proteins that require proteolytic cleavage to achieve activity in solution and/or to bind to cell surface HER proteins. This requirement for cleavage acts to control ligand availability and receptor activation. Proteases involved in EGF ligand shedding include, for example, those from the metalloproteinase family including the disintegrin and metalloprotease (ADAM) family, and the matrix metalloproteinase (MMP) family. Activation of G-protein-coupled receptors (GPCRs) regulates the production of EGF ligands. In cancers, dysregulation of GPCR signaling and the prevalence of EGF ligands in tumors, is associated with the constitutive activation of HER receptors.

[0585] The table below lists exemplary well-known and well-characterized of the EGF family ligands, and their receptor specificity. The ligands are divided into three groups, based upon their receptor preference (outlined as Groups 1-3 in the Table below). None of the ligands bind to HER2, which heterodimerizes with each of the other family members. In Table 7 below, alternative names for the neuregulin (NRG) family of cytokines include Neu differentiation factors, NDFs, or heregulins (HRG). The Neuregulin/Heregulin family of ligands is structurally related growth factors derived from alternatively spliced NRG-1, NRG-2, NRG-3, or NRG-4 genes. For example, there are at least 14 soluble and transmembrane protein isoforms derived from the NRG-1 gene. Proteolytic processing of the extracellular domain of the transmembrane NRG-1 isoform releases soluble growth factors. HRG-1β is one of these and contains an Ig domain and an EGF-like domain that is necessary for direct binding to HER3 and HER4. A recombinant human HRG-1β containing only the EGF domain of heregulin β is sufficient to bind and activate HER receptors. Another isoform of the NRG-1 gene is HRG1-a. The binding affinity of HRGα is 100-fold weaker than HRGβ for HER3 and HER4 (Jones et al. (1999) FEBS Letters, 447: 227-231). There are at least two NRG-2 isoforms, called NRG2-α and NRG2-β. Both NRG2α and NRG2β are HER3 agonists and stimulate HER3 signaling. NRG2β also is an agonist of HER4, but NRG2α in not a potent stimulus of HER4 tyrosine phosphorylation or signaling. There are no other reported isoforms of NRG-3 and NRG-4.

TABLE 7
HER Family Ligands

| | HER Family Ligands | | | |
|---|---|---|---|---|
| Ligand | HER1 | HER2 | HER3 | HER4 |
| 1. | | | | |
| Epidermal Growth Factor (EGF) | X | | | |
| Amphiregulin (AR) | X | | | |
| TGF-alpha | X | | | |
| 2. | | | | |
| betacellulin (BTC) | X | | | X |
| heparin-binding EGF (HB-EGF | X | | | X |
| epiregulin (EPR) | X | | | X |
| 3. | | | | |
| Neuregulin 1 (NRG-1) | | | X | X |
| Neuregulin 2 (NRG-2) | | | X | X |
| Neuregulin 3 (NRG-3) | | | | X |
| Neuregulin 4 (NRG-4) | | | | X |

[0586] Since there are well over 15 different EGF ligands that can bind to HER family members, control and regulation of HER family signaling is complex. Among factors that regulate this complex system of signaling include the tissue specific expression of the receptor ligands. For example, NRGs are expressed predominantly in parenchymal organs and in the embryonic central and peripheral nervous systems. In addition, although ligands typically bind to monomeric receptors, they are unable to activate monomeric receptors. Instead, dimeric formation of receptors, and ultimately HER-mediated activation and signaling, is driven by the higher stability of a complex of two HER receptors and a ligand compared to a monomeric receptor. Ligand binding to a monomeric receptor not only mediates a conformational change of a monomeric receptor to allow for receptor homo- or heterodimerization (see below), but ligands also stabilize the dimeric receptor once formed. Thus, for activation, various dimeric pairs depend on the concentration of receptors, as well as the concentration of ligand. Thus, activation of the HERs is controlled by the spatial and temporal expression of their ligands.

### 6. Dimerization Versus Tethering and Generation of Active Homo- and Heterodimers

[0587] The mechanisms governing the activation of HER family receptors rely upon ligand binding and the induction of a conformational change in the receptor. Typically, an equilibrium exists between the inactive and active forms of the HER receptors. At least in the case of HER1, approximately 95% are present on the cell surface in a tethered or inactive form; and only 5% are in the active form.

[0588] In the absence of bound ligand, in the monomeric receptor, the dimerization arm in domain II is buried in an intramolecular tether by interaction with subdomain IV within the same molecule, thereby autoinhibiting the receptor. Thus, normally, all HER receptors, except for HER2, are in an inactive or “tethered” conformation. The tethered conformation is a closed formation of the receptor that prevents interaction of the receptor with other HER family members. Normally, in this conformation the ligand binding domains I and III are held far apart. This is true for all HER family receptors, except for HER2. For HER2, even as a monomeric receptor, domains I and III are structurally close together and sterically inhibit the binding of ligand to this region. As a result, HER2 is unable to bind to ligand, and always has its dimerization arm exposed and ready to facilitate dimerization with another HER family receptor. Ligand-induced dimerization of HER receptor molecules induces receptor activation and provides the normal downstream signaling mechanism of the HER family of receptors. Activating ligands interact with domains I and/or III, promoting a rearrangement in the ECD, resulting in opening of the tethered conformation and exposure of the dimerization arm. The bound ligand fixes the relative positions of domains I and III forcing them to rotate (approximately 1300 for the case of HER1). This rearrangement breaks the intramolecular domain II/IV linkage, or tether, and frees up the dimerization arm so that it is able to participate in intermolecular interactions. This results in an “open” or active conformation of the receptor and renders the molecule competent to dimerize with other HER family members. HER2 is always in the open conformation, even as a monomer. Thus, even in the absence of ligand, HER2 is capable of dimerizing with another HER family member, although it does not dimerize with itself unless overexpressed. In the open configuration, the dimerization arm (see FIG. 1) protrudes out from domain II and is able to interact with a pocket at the base of the domain II dimerization loop in a second receptor via non-covalent interactions, such as homophilic and hydrophobic interactions, van der Waals interactions and hydrogen bonding, Mutations in the dimerization loop can lead to constitutive dimerization, which in the case of HER2 has been shown to induce cell transformation (Bazley et al. (2005) Endocrine-Related Cancer 12:S17-S27). There are contacts between the subdomain loop II and subdomains I and II. Higher order structures such as heterotetramers also can form (see, e.g., Jorissen et al. (2003) Exptl. Cell Res. 284:31-53).

[0589] The dimerization arm alone is not sufficient for dimerization. Additional interactions, including domain II/III interactions, stabilize receptor dimerization (see, e.g., Dawson et al., (2005) Mol. Cell. Biol. 25:7734-7742). As discussed above, while the dimerization arm is highly conserved among HER1, 2, 3 and 4, HER2 fails to form homodimers. For HER1, module 6 provides additional self-complementary interactions (including D279 and H280) for homodimerization. Module 7 is involved in HER2/HER3 heterodimerization. These residues are conserved among all four HER receptors. (see, e.g., Dawson et al., (2005) Mol. Cell. Biol. 25:7734-7742).

### 7. HER Family Receptor Activity

[0590] The HERs are expressed in various tissues of epithelial, mesenchymal, and neuronal origin and regulate growth, survival, proliferation, and differentiation. Under normal physiological conditions, activation of the HERs is controlled by the spatial and temporal expression of their ligands, which are members of the EGF family of growth factors (see above). Ligand binding to HER receptors induces the formation of receptor homo- and heterodimers and activation of the intrinsic kinase domain, resulting in phosphorylation on specific tyrosine residues within the cytoplasmic tail. These phosphorylated residues serve as docking sites for a range of effector proteins, the recruitment of which leads to the activation of intracellular signaling pathways. For example, the phosphatidylinositol 3-kinase (PI3K)-AKT pathway is stimulated by recruitment of the p85 adaptor subunit of P13K to the receptor. The mitogen-activated protein kinase (MAPK) pathway is activated by recruitment of growth-factor-receptor-bound protein 2 (GRB2) or SHC to the receptor.

[0591] Activation of each of the receptors differs from one another in several respects. For example, HER2 has no corresponding growth factor ligand, and HER3 has no well-defined tyrosine kinase activity. These two receptors are generally co-dependent upon other members for their ability to signal, although HER2 is capable of potent signaling without a co-receptor or ligand when it is sufficiently overexpressed. In contrast, the HER3 homodimer is completely inactive due to the deficient kinase activity of the tyrosine kinase domain. Typically, HER heterodimers are more potent in signaling than are HER homodimers. This is because heterodimerization provides distinct cytoplasmic tails from two different receptors thereby providing additional phosphotyrosine residues and different patterns of phosphorylation for the recruitment of distinct effector molecules. Thus, HER heterodimerization is a mechanism by which signaling can be amplified and diversified. The HER2/HER3 heterodimer is the most potent receptor signaling pair. There are several reasons for the increased potency of the HER2/HER3 heterodimer. First, HER2 and HER3 are coupled to diverse signaling pathways including the mitogen-activated protein kinase (MAPK) pathway important in cell proliferation, and the phosphatidylinositol 3-kinase (PI3K)/AKT pathway which regulates cell survival and antiapoptotic signals. In addition, a HER2/IIER3 heterodimer also has prolonged signaling due to efficient receptor recycling and inefficient downregulation of cell surface receptor expression.

[0592] Each of the HER receptors has been shown to have a role in diverse cellular processes including cell differentiation, cell proliferation, cell survival, angiogenesis, and migration and invasion. HER receptors are essential mediators of cell proliferation and differentiation in the developing embryo and in adult tissues, but their inappropriate activation is associated with the development and severity of many cancers, including for example, breast, colon and prostate cancer, and other diseases. There are a number of mechanisms that affect the inappropriate activation of HER receptors associated with disease. Among these include, for example, gene amplification or transcriptional abnormalities leading to receptor overexpression, gene mutation, and autocrine stimulation resulting from the overproduction of HER ligands. Thus, targeting of HER receptors such as, for example, by pan-therapeutics provided herein, is a mechanism by which these processes can be modulated to treat diseases or conditions associated with inappropriate HER signaling. The following are among such activities and corresponding cellular processes mediated by HER receptor signaling. These processes, cell proliferation, cell survival, angiogenesis and cell migration and invasion are hallmarks of tumorigenesis. These processes also can be monitored in vitro, such as is described in Section G, to assess the feasibility of such therapeutics.

a. Cell Proliferation

[0593] HER receptor signaling plays a role in regulating proliferation through control of the cell cycle checkpoint. For example, HER2 overexpression dysregulates the G1-S transition and drives cell proliferation. Robust signaling induced by HER2 results in increased levels of the proteins c-Myc and cyclin D. Each of these proteins acts to sequester the protein p27, which is a cyclin kinase inhibitor. Cyclin E-CDK2 mediates cell cycle entry. Sequestration of p27 prevents its binding to cyclin E-CDK2 to inhibit its activity, and thus uncontrolled cell proliferation results. Inhibition of HER2 signaling results in a downregulation of the MAPK and PI3K/AKT pathways, which decreases levels of c-Myc and cyclin D. This permits uncomplexed p27 to bind to and inactivate cyclin E-CDK2 to prevent continued cell proliferation.

b. Cell Survival

[0594] HER family receptors regulate cell survival by modulating effector proteins involved in the intrinsic pathway of apoptosis. For example, cell survival by HER signaling is mediated through the PI3K/AKT pathway, which targets substrates that inhibit the proapoptotic proteins BAD and caspases 9. In addition, target substrates phosphorylated by AKT also include transcription factors that inhibit the expression of several pro-apoptotic genes, such as for example, FAS ligand, as well as other transcription factors (i.e., NF-κB) that upregulate levels of pro-survival proteins, such as for example, BCL-X_{L}.

c. Angiogenesis

[0595] HER signaling induces the expression of a variety of proangiogenic factors, such as for example, vascular endothelial growth factor (VEGF). For example, HER1 activation induces VEGF production. In addition, overexpression of HER2 is associated with increased VEGF production in colon, pancreatic, gastric, breast, renal cell, and non-small lung cell cancers. The angiogenic effects of VEGF is related to its role in the development of new blood vessels (i.e., angiogenesis) and in vascular maintenance or the survival of immature blood vessels, through its binding and activation of two related receptors expressed on endothelial cells (i.e., VEGFR-1 and VEGFR-2). Angiogenesis plays a role in tumorigenesis.

d. Migration and Invasion

[0596] Stimulation of HER signaling also mediates various aspects of cell motility and migration, which play important roles during embryonic development, wound healing, and in tumor growth and metastasis. Cell motility responses can be initiated by a broad spectrum of signaling pathways induced upon HER activation. For example, activation of the PLCγ-dependent pathway by HER1 is linked to HER1-induced cell migration, since inhibition of this enzyme blocks EGF-induced cell movement (Jorissen et al. (2003) Exp. Cell Res. 284:31-53). The mechanism of EGF-mediated cell migration has been linked to stimulation of actin cytoskeleton rearrangement due to PLC-T-mediated release of actin-modifying proteins (i.e., gelsolin, profiling, cofilin, and CapG). MAPK also plays a role in HER-mediated cell motility, such as for example, by modulating integrin levels. Other signaling pathways or effector molecules involved in HER-mediated cell migration and motility include PI3K, and the downstream effector molecules Rac, involved in membrane ruffling and lamellipodia formation, and Rho, involved in cell rounding and cortical actin polymerization.

[0597] In addition, migration and invasion induced by HER signaling also has been linked to the increased expression of matrix metalloproteinases (MMP), which cleave constituents of the extracellular matrix. For example, stimulation of HER3 and HER4 by neuregulin is linked with invasion and the generation of proteolytic activity by tumor cells due to the induction of MMP-2 and MMP-9.

### 8. Other CSR ECDs

[0598] In addition to targeting HER family members, therapeutics provided herein also can be designed to target any other cell surface receptor (CSR), or their ligands, involved in a disease process, including but not limited to, oncogenesis, angiogenesis, or inflammatory diseases. In particular, the other ECD is from a receptor that participates in or is involved in development of resistance to therapeutics that target one receptor.

[0599] Typically, such a CSR is a receptor tyrosine kinase (RTK). Generally, such a therapeutic contains the ECD, or portion thereof, of the CSR sufficient to interact with ligand and/or to prevent receptor dimerization. Examples of RTKs include, but are not limited to, epidermal growth factor (EGF) receptors (as discussed above), platelet-derived growth factor (PDGF) receptors, fibroblast growth factor (FGF) receptors, insulin-like growth factor (IGF) receptors, nerve growth factor (NGF) receptors, vascular endothelial growth factor (VEGF) receptors, receptors to ephrin (termed Eph), hepatocyte growth factor (HGF) receptors (termed MET), TIE/Tie-1 or TEK/Tie-2 (the receptor for angiopoietin-1), discoidin domain receptors (DDR) and others, such as Tyro3/Ax1. Other CSRs for which an ECD portion can be used a therapeutic include, but are not limited to, a TNFR (i.e., TNFR1, TNFR2, CD27, 4-11B1, OX40, HVEM, LtβR, CD30, GITR, CD40, and others), or RAGE. Table 8 below lists exemplary CSRs, and sets forth the amino acids which make up the ECD of the respective polypeptide. Exemplary sequences of RTKs and other CSRs and the encoded amino acids are set forth in any of SEQ TD NOs: 193-262.

TABLE 8
Exemplary Cell Surface Receptors, and ECD portions thereof

| Family | Member | SEQ ID NO. | ECD | SEQ ID NO. |
|---|---|---|---|---|
| PDGFR | CSF1R | 193 | 20-512 | 194 |
| | FLT3 | 195 | 27-543 | 196 |
| | KIT | 197 | 23-520 | 198 |
| | PDGFRA | 199 | 24-524 | 200 |
| | PDGFRB | 201 | 33-531 | 202 |
| DDR | DDR1 | 203 | 19-416 | 204 |
| | DDR2 | 205 | 22-399 | 206 |
| EPH | EPHA1 | 207 | 24-547 | 208 |
| | EPHA2 | 209 | 25-534 | 210 |
| | EPHA3 | 211 | 21-541 | 212 |
| | EPHA4 | 213 | 20-547 | 214 |
| | EPHA5 | 215 | 25-573 | 216 |
| | EPHA6 | 217 | 23-549 | 218 |
| | EPHA7 | 219 | 25-556 | 220 |
| | EPHA8 | 221 | 31-524 | 222 |
| | EPHB1 | 223 | 18-540 | 224 |
| | EPHB2 | 225 | 19-543 | 226 |
| | EPHB3 | 227 | 34-559 | 228 |
| | EPHB4 | 229 | 16-539 | 230 |
| | EPHB6 | 231 | 17-579 | 232 |
| FGFR | FGFR1 | 233 | 22-376 | 234 |
| | FGFR2 | 235 | 22-377 | 236 |
| | FGFR3 | 237 | 23-375 | 238 |
| | FGFR4 | 239 | 22-369 | 240 |
| MET | MET | 241 | 25-932 | 242 |
| | RON | 243 | 25-957 | 244 |
| TIE | TEK (Tie-2) | 245 | 23-745 | 246 |
| | TIE (Tie-1) | 247 | 22-759 | 248 |
| TNFR | TNFR1 | 249 | 22-211 | 250 |
| | TNFR2 | 251 | 23-257 | 252 |
| VEGFR | VEGFR1 | 253 | 27-758 | 254 |
| | VEGFR2 | 255 | 20-764 | 256 |
| | VEGFR3 | 257 | 25-775 | 258 |
| IGF-1R | IGF-1R | 259 | 31-935 | 260 |
| RAGE | RAGE | 261 | 23-342 | 262 |

[0600] The ectodomains of RTKs, including growth factor receptors, are made up of a diverse group of modular domains, including, but not limited to, fibronectin type III, cysteine-rich, epidermal growth factor, and immunoglobulin (Ig)-like domains. For many RTKs, the Ig-like domain is responsible for ligand binding (see e.g., Wiesmann et al. (2000) J Mol. Med. 78:247-260). An Ig-like domain typically contains 80-110 residues that form two antiparallel β-sheets of three to five β-strands, with the β-sheets in some cases connected by a disulfide bond. Ig-like domains are grouped into four classes: the V (variable), I (intermediate), and C1 and C2 (constant), depending on the number of β-strands. For example, the domain of the C2 class contains the smallest number of β-strands containing 4 in the first β-sheet and four in the second β-sheet. Table 9 below sets forth exemplary RTK family members that contain Ig-like domains, and the ligands to which they bind.

TABLE 9

| Ectodomain Structure | Receptors | Ligands |
|---|---|---|
| 7 Ig-like domains | VEGFR1 | VEGF; PLGF |
| | VEGRF2 (KDR) | VEGF; VEGF-C |
| | VEGRF3 | VEGF-C |
| 5 Ig-like domains | PDGFRA, PDGFRB | PDGF-AA; PDGF-BB; PDGF- |
| | | AB |
| | CSF1R | SCF |
| | SCFR | SCF |
| | Flt-3 | Flt-3L |
| 3 Ig-like domains | FGFR1-FGFR4 | FGF1-FGF18 |
| 2 Ig-like, 2 Cys-rich, 1 Leu- | Trk-A, TRK-B, TRK-C | NGF; NT3; NT4/5; BDNF |
| rich domain | | |
| 2 Ig-like, 2 fibronectin type | AXL, EYK, TYRO-3 | GAS6; Protein S |
| III domains | | |
| 2 Ig-like, 3 fibronectin type | Tie--1 | |
| III, 3 EGF domains | Tie-2 (TEK) | Angiopoietin-1; Angiopoietin-2 |
| 1 Ig-like, 1 Cys-rich and | ROR1, ROR2 | |
| Kringle domain | | |

[0601] The following discussion is for exemplification. It is understood that an ECD or portion thereof that is required for ligand binding and/or dimerization can be combined in a heteromultimer, particularly with a HER ECD or portion thereof.

a. VEGFR1 (Flt-1) and VEGFR2 (KDR)

[0602] VEGFR1 and VEGFR2 bind to VEGF and play a role in VEGF-induced angiogenic responses. VEGFR1 is required for endothelial cell morphogenesis, while VEGFR2 plays a role in mitogenesis. The ECD structure of both VEGFR1 and VEGFR2 contain seven Ig-like domains, and both receptors bind similarly to VEGF, although VEGFR1 also binds to the ligand PIGF. Thus, the differences in function between VEGFR1 and VEGFR2 appear to be in the intracellular tyrosine kinase sequence of the receptors and their different signal transduction properties. The related receptor VEGFR3 also contains seven Ig-like domains, but does not bind to VEGF. For the sequence of VEGFR1 depicted in SEQ ID NO:254, the first Ig-like domain corresponds to amino acids 32-123, the second Ig-like domain corresponds to amino acids 151-214, the third Ig-like domain corresponds to amino acids 230-327, the fourth Ig-like domain corresponds to amino acids 335-421, the fifth Ig-like domain corresponds to amino acids 428-553, the sixth Ig-like domain corresponds to amino acids 556-654, and the seventh Ig-like domain corresponds to amino acids 661-747. For the sequence of VEGFR2 depicted in SEQ ID NO:256, the first Ig-like domain corresponds to amino acids 46-110, the second Ig-like domain corresponds to amino acids 141-207, the third Ig-like domain corresponds to amino acids 224-320, the fourth Ig-like domain corresponds to amino acids 328-414, the fifth Ig-like domain corresponds to amino acids 421-548, the sixth Ig-like domain corresponds to amino acids 551-660, and the seventh Ig-like domain corresponds to amino acids 667-753.

[0603] For VEGFR1, the second Ig-like domain (domain 2) determines ligand binding and specificity, as deletion of this domain from the VEGFR1 ECD abolishes the receptor's ability to bind VEGF (Smyth et al. (1996) EMBO J. 15:4919-4927). Deletion of the other domains only reduces binding to VEGF, but does not abolish it. Domain 2 alone, however, is insufficient to bind VEGF. Domain 1 and 2, or domains 2 and 3 also showed no or minimal binding to VEGF. An ECD portion of VEGFR1 containing only domains 1, 2, and 3 has essentially identical affinity for VEGF as a full-length VEGFR1.

b. FGFR1-FGFR4

[0604] The ECD of FGFRs contains three Ig-like domains. For example, for the sequence of FGFR2 depicted in SEQ ID NO:236, the first Ig-like domain corresponds to amino acids 39-125, the second Ig-like domain corresponds to amino acids 154-247, and the third Ig-like domain corresponds to amino acids 256-358. There are four FGFRs generated by alternative splicing. Individual FGFRs are activated by a subset of ligands (among at least 19 related FGF ligands), and alternative splicing in Ig domain III can dramatically change the specificity for certain ligands (Chellaiah et al. (1999) JBC, 274:34785-34794). Thus, the major ligand binding sites for FGF ligands are typically located within distinct Ig-like domains, most generally domain 2 and domain 3 (Cheon et al. (1994) PNAS, 91:989-993). For example, mutation of domain 3 in FGFR2 inhibits the binding of FGF2, without affecting the binding of FGF1 and FGF7. In addition, studies with chimeric FGFR molecules have determined that FGF1 binds to either domain 2 or domain 3; FGF2 preferentially recognizes the distal sequence of FGFR1 containing Ig domain 2 and 3; FGF8 recognizes sequences both N-terminal and C-terminal to Ig domain 2 or FGFR3; and FGF9 binding is dependent on sequences N-terminal to and including Ig domain 2 in FGFR3, with no requirement for domain 3 (Chellaiah et al. (1999) JBC, 274:34785-34794). For binding of FGF to FGFRs, the presence of heparin optimizes the ligand binding affinity.

c. IGF-1R

[0605] Exemplary of RTK receptors is IGF-1R. The insulin receptor family contains homologous tyrosine kinase receptors, including insulin receptor (IR), insulin-like growth factor 1 receptor (IFG1R), and insulin receptor-related receptor. Both the IR and IGF-1R are synthesized as single polypeptide chains and are proteolytically cleaved to yield two distinct chains, termed α and ρ, linked by disulfide bonds. The α chain is the extracellular portion of the receptor and binds ligand, while the β chain has an extracellular region, a single transmembrane segment and an intracellular tyrosine kinase domain that mediates signal transduction upon binding of ligand. The extracellular portion of the IGF-1R has six structurally distinct domains. The first three are homologous to HER extracellular domains I-III, namely L1 (corresponding to amino acids 51-61 of SEQ ID NO:260), a cysteine-rich domain (corresponding to amino acids 175-333 of SEQ ID NO:260), and L2 (corresponding to amino acids 352-467 of SEQ ID NO:260). These three domains form the minimal ligand binding portion of the receptor and mediate low-affinity binding to insulin. C-terminal to the L2 domain are three extracellular fibronectin type 3 modules, one in the α chain (corresponding to amino acids 489-587 of SEQ ID NO:260), one in the α-β linking module (corresponding to amino acids 611-703 of SEQ ID NO:260), and a third in the β chain (corresponding to amino acids 831-926 of SEQ ID NO:260). The α and β chains form an αβ heterodimer and two heterodimers associate via disulfide bonding to form the intact (αβ)2 receptor. As with HER family receptors, ligand binding is required to activate the receptor and induce transphosphorylation of the cytoplasmic domain. Activation of IGF-1R is involved in cell growth, transformation, and apoptosis.

d. RAGE and Other CSRs

[0606] Other CSR ECDs contemplated herein, including those from RAGE CSRS (see, copending U.S. application Ser. No. 11/429,090) and references cited therein for a description of RAGE CSRs and also for exemplary ECDs and CSR isoforms. Table 8 above also set forth the sequence of a full-length RAGE and the ECD portion thereof.

### D. COMPONENTS OF ECD MULTIMERS AND THE FORMATION OF ECD MULTIMERS

[0607] ECD heteromultimers include at least two different ECDs, or portions thereof for binding to ligand and/or dimerization. In exemplary embodiments herein, at least one of the components of ECDs is a HER ECD, generally at least one of a HER1, 3, or 4, or a portion thereof for ligand binding and/or dimerization. Generally, at least two of the ECDs are HERs, particular HER1 and HER3 or HER4. Other ECDs include ECDs from other CSRs, generally RTKs, particularly any associated with oncogenesis or angiogenesis or inflammatory diseases, and typically any associated with resistance to drugs targeted to a single cell surface receptor. ECD polypeptides also can be hybrid ECD molecules containing domains from two or more CSRs. The ECDs in the heteromultimers are linked, whereby multimers, of at least heterodimers form.

[0608] Any linkage is contemplated that permits or results in interaction of the ECDs to form a heteromultimer, whereby the resulting multimeric molecule interacts with ligand for of one or all of the ECD cognate receptors and/or interacts with one or both of the cognate receptor(s) or other interacting receptor to inhibit dimerization. Such linkages can be any stable linkage based upon covalent and non-covalent interactions.

### 1. ECD Polypeptides

[0609] ECD polypeptides for use in the generation of ECD multimers provided herein can be all or part of an ECD of a CSR such as, for example, any RTK, or any ECD-containing portion thereof. Typically, unless the ECD is all or part of a HER2, the resulting ECD retains its ability to bind ligand. In addition, an ECD that is of the HER family, for example all or part of HER1, HER2, HER3, or HER4 typically also retains its ability to dimerize with a HER family receptor, including full-length HER family receptors. Thus, where a multimer partner is a HER ECD, the HER ECD polypeptide portion includes at least a sufficient portion of subdomain I and subdomain III to bind ligand, and a sufficient portion of subdomain II for dimerization. Generally, the HER ECD also contains at least part of module 1 of subdomain IV. The remainder of subdomain IV is optional.

a. HER Family Full Length ECD

[0610] The ECD polypeptide contained within HER multimers provided herein can be a full-length ECD of a HER polypeptide. For HER polypeptides, the HER ECD contains domains I, II, III, and IV sufficient to enable binding of ligand and to mediate dimerization with a cognate or related HER family receptor. HER ECD polypeptides also include allelic or species variants, or other known variants within the ECD portion of a HER polypeptide so long as the resulting HER ECD polypeptide retains its ability to bind to ligand and/or to dimerize with a cognate receptor or related HER family receptor.

i. HER1 ECD

[0611] A full-length HER1 ECD polypeptide can be used in the formation of ECD multimers provided herein. Such a full length HER1 ECD contains amino acid residues 1-621 of a mature HER1 receptor (HER1-621; HF100). The nucleotide sequence of the HF100 molecule is set forth in SEQ ID NO:11 and encodes a full length HER1 ECD polypeptide having a sequence of amino acids set forth in SEQ ID NO:12. A full-length HER1 ECD polypeptide includes any having one or more variations in amino acid sequence as compared to the exemplary HER1 ECD polypeptide set forth in SEQ ID NO:12. Exemplary of variations in a HER1 polypeptide are any variations corresponding to any allelic variants in a precursor HER1 polypeptide as set forth in SEQ ID NO:263. Exemplary variations in a HER1 full-length ECD polypeptide include any one or more variations corresponding to, for example, any one or more of R74Q, P242R, R497K, or C604S in SEQ ID NO:12.

ii. HER2 ECD

[0612] ECD multimers provided herein also can contain a full-length HER2 ECD polypeptide containing amino acid residues 1-628 of a mature HER2 receptor (HER2-650; HF200). The nucleotide sequence of the F11200 molecule is set forth in SEQ ID NO:17 and encodes a full length HER2 ECD polypeptide having a sequence of amino acids set forth in SEQ ID NO:18. A full-length HER2 ECD polypeptide includes any having one or more variations in amino acid sequence as compared to the exemplary HER2 ECD polypeptide set forth in SEQ ID NO: 18. Exemplary of variations in a HER2 polypeptide are any variations corresponding to any allelic variants in a precursor HER2 polypeptide as set forth in SEQ ID NO:264. Exemplary variations in a HER2 full-length ECD polypeptide include any one or more variations corresponding to any one or more of W430C in SEQ ID NO:18.

iii. HER3 ECD

[0613] In another example, a full-length HER3 ECD polypeptide can be used in the formation of ECD multimers provided herein. Such a HER3 ECD polypeptide contains amino acid residues 1-621 of a mature HER3 receptor (HER3-621; HF300). The nucleotide sequence of the HF300 molecule is set forth in SEQ ID NO:25 and encodes a full length HER3 ECD polypeptide having a sequence of amino acids set forth in SEQ ID NO:26. A full-length HER3 ECD polypeptide includes any having one or more variations in amino acid sequence as compared to the exemplary HER3 ECD polypeptide set forth in SEQ ID NO:26. Exemplary of variations in a HER3 polypeptide are any variations corresponding to any allelic variants in a precursor HER3 polypeptide as set forth in SEQ ID NO:265. Exemplary variations in a HER3 full-length ECD polypeptide include any one or more variations corresponding to any one or more of G541E in SEQ ID NO:26.

iv. HER4 ECD

[0614] ECD multimers provided herein also can contain a full-length HER4 ECD polypeptide containing amino acid residues 1-625 of a mature HER4 receptor (HER4-650; HF400). The nucleotide sequence of the H1F400 molecule is set forth in SEQ ID NO:31 and encodes a full length HER4 ECD polypeptide having a sequence of amino acids set forth in SEQ ID NO:32. A full-length HER4 ECD polypeptide includes any having one or more variations in amino acid sequence as compared to the exemplary HER4 ECD polypeptide set forth in SEQ ID NO:32. Exemplary of variations in a HER4 polypeptide are any variations corresponding to any allelic variants in a precursor HER4 polypeptide as set forth in SEQ ID NO:266. Exemplary variations in a HER4 full-length ECD polypeptide include any one or more amino acid variations corresponding to the sequence of amino acids set forth in SEQ ID NO:32.

b. HER Family Truncated ECD

[0615] The ECD polypeptide contained within HER multimers provided herein can be a truncated ECD of a HER polypeptide. For truncated HER polypeptides, the HER ECD typically contains a sufficient portion of domains I and III to bind ligand, and a sufficient portion of domain II to mediate receptor dimerization. Generally, truncated HER ECDs also contain at least a portion of module 1 of domain IV to, for example, stabilize the molecule. Any remaining portion of domain IV is optional. Additionally, a truncated ECD polypeptide also can include additional sequence not part of the HER ECD, so long as the additional sequence does not inhibit or interfere with the ligand binding and/or receptor dimerization of the HER ECD polypeptide. For example, truncated ECD polypeptides can include polypeptides generated by alternative splicing, such as, but not limited to, polypeptides that contain intron-encoded amino acids. Truncated HER ECD polypeptides also include, but are not limited to, allelic or species variants, or other known variants within the ECD portion of a truncated HER polypeptide so long as the resulting truncated HER ECD polypeptide retains its ability to bind to ligand and/or to dimerize with a cognate receptor or related HER family receptor.

i. Truncated HER1 ECD

[0616] In one example a truncated HER1 ECD polypeptide that can be used in the ECD multimers provided herein contains amino acid residues 1-501 of a mature HER1 receptor (HER1-501; HF110). The nucleotide sequence of the HF110 molecule is set forth in SEQ ID NO:9 and encodes a truncated HER1 ECD polypeptide having a sequence of amino acids set forth in SEQ ID NO:10. HF110 contains all of domains I, II, and III of a cognate HER1 ECD, and all of module 1 of domain IV. Also contemplated for use in ECD multimers are truncated HER1 ECD polypeptides generated from alternative splicing. Such isoforms include any known in the art, or described in related U.S. Patent Publication No. US 2005-0239088, or provided herein below as intron fusion proteins. One such exemplary truncated HER1 ECD polypeptide is EGFR isoform b (NP_958439; SEQ ID NO:129) encoded by a sequence of nucleotides set forth in SEQ ID NO:128. This truncated HER1 ECD polypeptide is 628 amino acids, including a signal peptide corresponding to amino acid residues 1-24, and contains one additional amino acid at its C-terminal end not present in a cognate HER1 ECD. The mature form of the precursor truncated HER1 ECD polypeptide set forth in SEQ ID NO:129 (not including the signal sequence) is 604 amino acids in length as depicted in FIG. 2A and contains domains I, II, and III, and most all of domain IV up to and including most of module 7 of a cognate HER1 ECD. In an additional example, a truncated HER1 ECD polypeptide can include EGFR isoform d (NP 958441; SEQ ID NO:131) encoded by a sequence of nucleotides set forth in SEQ ID NO:130. This truncated HER1 ECD polypeptide is 705 amino acids, including a signal peptide corresponding to amino acid residues 1-24, and contains 76 additional amino acids at its C-terminal end not present in a cognate HER1 ECD. The mature form of the precursor truncated HER1 ECD polypeptide set forth in SEQ ID NO:131 (not including the signal sequence) is 681 amino acids in length as depicted in FIG. 2A, and contains domains I, II, and III, and most of domain IV including up to and most of module 7 of a cognate HER1 ECD.

[0617] A truncated HER1 ECD polypeptide includes any having one or more variations in amino acid sequence as compared to, for example, the exemplary truncated HER1 ECD polypeptide set forth in SEQ ID NO: 10, 129, or 131. Exemplary of variations in a HER1 polypeptide are any variations corresponding to any allelic variants in a precursor HER1 polypeptide as set forth in SEQ ID NO:263. Exemplary variations in a truncated HER1 ECD polypeptide include any one or more variations corresponding to any one or more of R74Q, P242R, or R497K in SEQ ID NO:10. Exemplary variations also can include any one or more amino acid variations corresponding to R98Q, P266R, R521K, C628S or, V674I in a truncated HER1 polypeptide having a sequence of amino acids set forth in SEQ ID NO:129 or 131.

ii. Truncated HER2 ECD

[0618] ECD multimers also can contain truncated HER2 ECD polypeptides. For example, a truncated HER2 ECD polypeptide containing amino acid residues 1-573 of a mature HER2 receptor (HER2-595; H1F210) can be used in the formation of ECD multimers. The nucleotide sequence of the H1F210 molecule is set forth in SEQ ID NO:15 and encodes a truncated HER2 ECD polypeptide having a sequence of amino acids set forth in SEQ ID NO:16. HF210 includes all of domains I, II, and III, and up to and including part of module 5 of domain IV of a cognate HER2 ECD. Also provided herein as a multimerization partner is a truncated HER2 ECD polypeptide containing amino acid residues 1-508 of a mature Her2 receptor (HER2-530; F11220). The nucleotide sequence of 11220 is set forth in SEQ ID NO: 13 and encodes a truncated HER2 ECD polypeptide having a sequence of amino acids set forth in SEQ ID NO:14. HF220 includes all of domains I, II, and III, and up to and including all of module 1 of domain IV of a cognate HER2 receptor.

[0619] Also contemplated for use in ECD multimers are truncated HER2 ECD polypeptides generated from alternative splicing. Such isoforms include any known in the art, or described in related U.S. Patent Publication No. US 2005-0239088, or provided herein below as intron fusion proteins. One such exemplary truncated HER2 ECD polypeptide is ErbB2.1e having a sequence of amino acids set forth in SEQ ID NO:137. This truncated HER2 ECD polypeptide is 633 amino acids, including a signal peptide corresponding to amino acid residues 1-22. The mature form of the precursor truncated HER2 ECD polypeptide set forth in SEQ ID NO:137 (not including the signal sequence) is 611 amino acids in length as depicted in FIG. 2B, and contains domains I, II, and III, and most all of domain IV up to and including most of module 7 of a cognate HER2 ECD. In an additional example, a truncated HER2 ECD polypeptide is ErbB2.1d having a sequence of amino acids set forth in SEQ ID NO:136. This truncated HER2 ECD polypeptide is 680 amino acids, including a signal peptide corresponding to amino acid residues 1-24 that contains a two amino acid insert as compared to the signal peptide in a cognate HER2 set forth in SEQ ID NO:4. ErbB2.1d also contains 30 additional amino acids at its C-terminal end not present in a cognate HER2 ECD. The mature form of the precursor truncated HER2 ECD polypeptide set forth in SEQ ID NO: 136 (not including the signal sequence) is 656 amino acids in length as depicted in FIG. 2B, and contains domains I, II, and III, and most of domain IV including all of modules 1-7 of a cognate HER2 ECD.

[0620] A truncated HER2 ECD polypeptide includes any having one or more variations in amino acid sequence as compared to, for example, the exemplary truncated HER2 ECD polypeptide set forth in SEQ ID NOs:14, 16, 136, and 137. Exemplary of variations in a HER2 polypeptide are any variations corresponding to any allelic variants in a precursor HER2 polypeptide as set forth in SEQ ID NO:264. Exemplary variations in a truncated HER2 ECD polypeptide include any one or more variations corresponding to W430C in SEQ ID NO:14 or 16. Exemplary variations also can include any one or more amino acid variations corresponding to W452C or W454C in a truncated HER2 polypeptide having a sequence of amino acids set forth in SEQ ID NO:137 or 136, respectively.

iii. Truncated HER3 ECD

[0621] An ECD multimer also can contain a truncated HER3 ECD polypeptide containing amino acid residues 1-500 of a mature HER3 receptor (HER3-500; HF310). The nucleotide sequence of the HF310 molecule is set forth in SEQ ID NO:19 and encodes a truncated HER3 ECD polypeptide having a sequence of amino acids set forth in SEQ ID NO:20. HF310 includes all of domains I, II, and III, and up to and including part of module 1 of domain IV of a cognate HER3 ECD. In another example, an ECD multimer can contain a truncated HER3 ECD polypeptide containing amino acid residues 1-519 of a mature HER3 receptor (HER3-519). The nucleotide sequence of HER3-519 is set forth in SEQ ID NO: 23 and encodes a truncated HER3 ECD polypeptide having a sequence of amino acids set forth in SEQ ID NO:24. HER3-519 includes all of domains I, II, and III, and up to and including part of module 3 of domain IV of a cognate HER3 receptor.

[0622] Also contemplated for use in ECD multimers are truncated HER3 ECD polypeptides generated from alternative splicing. Such isoforms include any known in the art, or described in related U.S. Patent Publication No. US 2005-0239088, or provided herein below as intron fusion proteins. One such exemplary truncated HER3 ECD polypeptide is p85HER3 set forth in SEQ ID NO:22 and encoded by a sequence of nucleotides set forth in SEQ ID NO:21. This truncated HER3 ECD polypeptide is 562 amino acids, including a signal peptide corresponding to amino acid residues 1-19, and contains 24 additional amino acid at its C-terminal end not present in a cognate HER3 ECD. The mature form of the precursor truncated HER3 ECD polypeptide set forth in SEQ ID NO:22 (not including the signal sequence) is 543 amino acids in length as depicted in FIG. 2C, and contains domains I, II, and III, and up to and including part of module 3 of domain IV of a cognate HER3 ECD.

[0623] A truncated HER3 ECD polypeptide includes any having one or more variations in amino acid sequence as compared to, for example the exemplary truncated HER3 ECD polypeptide set forth in SEQ ID NO:14, 16, 136, and 137. Exemplary of variations in a HER3 polypeptide are any variations corresponding to any allelic variants in a precursor HER3 polypeptide as set forth in SEQ ID NO:265.

iv. Truncated HER4 ECD

[0624] An ECD multimer can be formed containing a truncated HER4 ECD. One exemplary truncated HER4 ECD polypeptide contains amino acid residues 1-522 of a mature HER4 receptor (HER4-522). The nucleotide sequence of the HER4-522 molecule is set forth in SEQ ID NO:29 and encodes a truncated HER4 ECD polypeptide having a sequence of amino acids set forth in SEQ ID NO:30. HER4-522 includes all of domains I, II, and III, and up to and including module 1 of domain IV of a cognate HER3 ECD. Another exemplary truncated HER4 ECD polypeptide contains amino acid residues 1-460 of a mature HER4 receptor (HF410; HER4-485). The nucleotide sequence of HF410 is set forth in SEQ ID NO: 27 and encodes a truncated HER4 ECD polypeptide having a sequence of amino acids set forth in SEQ ID NO:28. H1F410 includes all of domains I, II, and most of domain III of a cognate HER4 ECD.

[0625] Also contemplated for use in ECD multimers are truncated HER4 ECD polypeptides generated from alternative splicing. Such isoforms include any known in the art, or described in related U.S. Patent Publication No. US 2005-0239088, or provided herein below as intron fusion proteins. One such exemplary truncated HER4 ECD polypeptide is ErbB4_int12 set forth in SEQ ID NO:159 and encoded by a sequence of nucleotides set forth in SEQ ID NO:158. This truncated HER4 ECD polypeptide is 506 amino acids, including a signal peptide corresponding to amino acid residues 1-25, and contains 10 additional amino acid at its C-terminal end not present in a cognate HER4 ECD. The additional amino acids are encoded by a portion of intron 12 of the HER4 gene retained as an alternative splice product. The mature form of the precursor truncated HER4 ECD polypeptide set forth in SEQ ID NO:159 (not including the signal sequence) is 481 amino acids in length as depicted in FIG. 2D, and contains domains I, II, and most of domain III of a cognate HER4 ECD.

[0626] A truncated HER4 ECD polypeptide includes any having one or more variations in amino acid sequence as compared to, for example the exemplary truncated HER4 ECD polypeptides set forth in SEQ ID NO:28, 30, and 159. Exemplary of variations in a HER3 polypeptide are any variations corresponding to any allelic variants in a precursor HER4 polypeptide as set forth in SEQ ID NO:266.

c. Hybrid ECD

[0627] Included herein are hybrid ECDs or portion thereof that contain subdomains from two or more HER receptors. Generally, a hybrid ECD contains all or a sufficient portion of domains I or III of one or more HER receptors to bind to ligands, and all or a sufficient portion of domain II to mediate receptor dimerization from the same or another HER ECD. Thus, a hybrid ECD molecule can contain portions of all HER family ECDs, generally a portion of three HER family ECDs and at least a portion of two HER family ECDs. Typically, such ECDs include subdomain II from HER2 and subdomains I and III, which can be from the same or different receptor, from ErbB1, 3 or 4. Each subdomain portion is selected such that the resulting ECD dimerizes and binds to at least one, and can bind to two or more (different), ligands. Hence, the combinations of domains are selected such that it binds to at least one ligand, and can bind to two ligands, and also includes a sufficient portion of subdomain II for dimerization. Exemplary of such hybrids is a monomeric hybrid ECD that contains subdomain I from HER3 or HER4, subdomain II from HER2 and subdomain III from HER1. For example, provided is a hybrid ECD that contains subdomain I from ErbB3, subdomain II from ErbB2 and subdomain III from ErbB 1. HRG will bind to HER3 or HER4 (subdomain I), and EGF will interact primarily with subdomain III of HER1 (see, e.g., Singer et al., (2001) J. Biol. Chem. 276:44266-44274; Kim et al. (2002) Eur. J. Biochem. 269:2323-2329). Hence, the hybrid binds to at least two ligands (see, e.g., Singer et al., (2001) J. Biol. Chem. 276:44266-44274). Furthermore, upon addition of a multimerization domain and formation of chimeric multimers, the resulting chimeric molecule can interact with at least two different HER receptors and at least two different ligands.

d. Other CSR or RTK ECDs, or Portions Thereof

[0628] Other ECD polypeptides, including any ECD portion, or fragment thereof of a CSR or other RTK sufficient to bind ligands, can be used in the formation of an ECD multimer provided herein. Typically, such CSR ECDs, or portions thereof, are ECDs of any CSR involved in an etiology of a disease and/or an ECD of a CSR involved in resistance to drugs targeted to a single cell surface receptor. Exemplary CSR or RTK receptors are set forth in Table 8, which also denotes the respective ECD portion of each respective receptor. Thus, any full-length ECD as set forth in Table 8 is contemplated for use as a multimerization partner herein. Portions or fragments of a full-length ECD of any of the CSRs depicted in Table 8 also are contemplated for use as a multimerization partner, so long as the portion or fragment retains its ability to bind ligand and/or dimerize with a cognate receptor. For example, a portion or fragment of a VEGFR ECD, such as a VEGFR1, contains at least a sufficient portion of Ig-domains 1, 2, and 3 to bind to ligand. In another example, a portion or fragment of a FGFR ECD, such as any of FGFR1-4, contains at least a sufficient portion of Ig-domains 2 and 3 to bind ligands and/or receptors. In an additional example, a portion or fragment of an IGF-1R ECD contains at least a sufficient portion of the L1 domain, the cysteine-rich domain, and the L2 domain to bind to ligand and/or mediate receptor dimerization.

e. Fusions to increase half-life

[0629] There are numerous approaches to increasing the short serum half-life of small polypeptide or protein therapeutics. PEGylation, which is increases the serum half-life of small protein therapeutics, has a disadvantage. PEGylation can decrease potency or activity of a protein therapeutic, can result in heterogeneity, and can result immunoreactivity of the protein. Other approaches involve fusion to albumin, which can improve protein circulation by increasing the molecular weight and reducing renal clearance.

[0630] Serum half-life also can be increased by fusion to Fc portion of IgGs. The long circulating half-life of approximately 2-3 weeks, and slow clearance rate, of IgGs originates, at least in part, from their interaction with the neonatal Fc receptor (FcRn), which binds IgGs with high affinity at acidic pH, and releases them at neutral or higher pH. FcRn binds to the Fc portion (within the CH2-CH3 domains) of pinocytosed IgGs in the acidic (˜pH 6) endosome in a 2:1 FcRn:IgG configuration (bivalent interaction), traffics them away from the lysosomal degradation pathway and to the cell surface, and recycles them back into circulation after exposure to the extracellular physiological pH (˜7.4), at which the Fc-FcRn complex dissociates. Poor binding to FcRn at acidic pH results in trafficking of an antibody to the lysosome where it is degraded. Recycling receptors, such as FcRn, also provide a route for the transport of IgGs across the epithelium (transcytosis) and into the blood stream. Leveraging the interaction with FcRn can improve protein transport across epithelial barriers, such as in the gut and the lungs, allowing for noninvasive administration. Residues in the Fc CH2 and CH3 domains are involved in FcRn binding, and their mutation in mAbs has been shown to affect the in vivo serum half-life. The circulation and delivery of small protein therapeutics can be improved by fusing them to the Fc domain of IgG, such that the resulting fusion proteins bind to FcRn and take advantage of the IgG serum stabilization pathway. Fusion with an Fc domain also increases the molecular weight of the therapeutic, reducing renal clearance, but can be undesirable due to the potentially reduced tissue penetration and specific activity of the fusion protein. Alternatively, studies have shown that short FcRn-binding peptides (FcRnBPs) allow for the interaction of small proteins with FcRn, obviating the need for fusion to a high molecular weight Fc domain. For example, fusion with an FcRnBP increases the molecular weight by approximately 3 kDa, in comparison to fusions with Fc or albumin, which increase the molecular weight by approximately 50-70 kDa (see, e.g., Datta-Mannan et al. (2019) Biotechnol. J. 14:1800007; Sockolosky et al. (2012) Proc. Natl. Acad. Sci. USA 109(40):16095-16100).

[0631] For example, short (16 residue) linear and cyclic FcRnBPs (see, e.g., SEQ ID NOs: 417-420) have been fused to the C-terminus, N-terminus, or both, of Fab heavy and light chains (FcRnBP-Fab constructs), with 1-4 FcRnBPs per Fab. Studies of the pharmacokinetics in cynomolgus monkeys have shown that the FcRn binding of FcRnBP-Fab constructs increases as the number of peptides fused to the Fab increases. This results from increased avidity, with constructs containing four linear FcRnBPs fused to the N- and C-termini of the heavy and light chains of the Fab showing the greatest improvement in pharmacokinetics in cynomolgus monkeys relative to the parental Fab. For example, the half-life improved from 3.7 hours for the parental Fab, to between 15-60 hours for the various FcRnBP-Fab constructs (see, e.g., Datta-Mannan et al. (2019) Biotechnol. J. 14:1800007). While these results indicate an improvement in serum half-life, it is still much lower than the half-life for an IgG, which is about 2-3 weeks. The use of FcRnBPs also does not reduce renal clearance, as they do not significantly increase the molecular weight of the therapeutics.

[0632] As discussed above, fusion with an IgG Fe increases the half-life of small protein therapeutics by taking advantage of FcRn binding, and also by increasing the molecular weight of the therapeutic, such that it is less rapidly cleared from the body, for example, by the kidneys. To improve the pharmacokinetics and overall pharmacology, residues within the Fc region can be mutated to increase the affinity for FcRn, generally by greater than 30-fold, further increasing the in vivo half-life. The Fc region spanning the interface of the CH2 and CH3 domains interacts with FcRn. Human Fc residues identified to play a role in FcRn binding include, for example, L251, M252, I253, S254, L309, H310, Q311, L314, E380, N434, H435 and Y436 (by EU numbering, see Table 4). Mutations in residues located at the Fc-FcRn interface, including M252, S254, T256, H433, N434 and Y436 (by EU numbering), improve the stability of the human FcRn-IgG1 complex. For example, the replacements M252Y/S254T/T256E and H433K/N434F/Y436H result in an 11-fold and 6.5-fold improvement in binding to human FcRn at pH 6.0 relative to the wild-type IgG1, respectively, with efficient release at pH 7.4. The combination of these replacements results in a 57-fold increase in binding affinity to FcRn. Additional mutations in IgG1 Fc that showed an improvement in binding to FcRn include, for example, M252W, M252Y, M252Y/T256Q, M252F/T256D, E380A, and N434F/Y436H (see, e.g., Dall'Acqua et al. (2002) J. Immunol. 169:5171-5180).

[0633] The triple substitution M252Y/S254T/T256E, when introduced into the CH2 domain of MEDI-524, a humanized anti-respiratory syncytial virus (RSV) mAb, increased the serum half-life of the mAb approximately 4-fold in cynomolgus monkeys when compared to unmodified MEDI-524. When introduced into the Fc portion of MEDI-522, a humanized, affinity-optimized mAb directed against the human αvβ3 integrin complex, the replacements M252Y/S254T/T256E (YTE) reduced its ADCC activity and its binding to human FcγRIIIA (F158 allotype). The ADCC activity of MEDI-522-YTE can be restored, and increased in comparison to unmodified MEDI-522, by introduction of the ADCC-enhancing replacements S239D/A330L/I332E (by EU numbering), indicating that the replacements YTE provide a reversible mechanism to modulate the ADCC function of a human IgG1 (see, e.g., Dall'Acqua et al. (2006) J. Biol. Chem. 281(33):23514-23524).

[0634] Residues at positions 250, 314 and 428 (by EU numbering) of the human IgG heavy chain, which are conserved among all four human IgG subtypes, also are located near the Fc-FcRn interface. The mutations T250Q, M428L and T250Q/M428L, when introduced into the Fc of a human IgG2 mAb, resulted in an increase in binding to FcRn at pH 6.0 of ˜3-, 7- and 28-fold, respectively, with no binding observed at pH 7.5. When the pharmacokinetics of the mutants were evaluated in rhesus monkeys, it was found that the mean clearance, i.e., the volume of serum antibody cleared per unit of time, was ˜1.8-fold lower for the M428L mutant, and ˜2.8-fold lower for the T250Q/M428L mutant, while the elimination half-life was ˜1.8-fold longer for the M428L mutant and ˜1.9-fold longer for the T250Q/M428L mutant, compared to unmodified antibody. Since these residues are conserved among IgG subtypes, the mutations M428L and T250Q/M428L are expected to have similar effects in human IgG1, IgG3 and IgG4 antibodies (see, e.g., Hinton et al. (2004) J Biol. Chem. 279(8):6213-6216). The modifications T250R/M428L were shown to result in selective binding to FcRn at pH 6.0, and a 2.8-fold decreased degradation of serum IgG2 and IgG1 in rhesus monkeys (see, e.g., Saxena et al. (2016) Front. Immunol. 7:580).

[0635] The mutation N434A (by EU numbering), when introduced into the human anti-HER2 IgG1 trastuzumab, resulted in ˜4-fold higher affinity towards human FcRn over unmodified antibody at pH 6, but negligible binding at pH 7.4. The N434A variant had increased exposure, decreased clearance (˜2-fold) and increased half-life (˜2-fold) compared to the wild-type antibody when tested in vivo in cynomolgus monkeys. In contrast, the mutation N434W, which resulted in ˜80-fold increased binding to FcRn at pH 6, exhibited a clearance rate similar to wild-type; this mutant also exhibited significant binding to FcRn at pH 7.4, indicating that maintaining pH-dependent binding of Fc mutants to FcRn is critical for improving the in vivo pharmacokinetics (Yeung et al. (2009) J. Immunol. 182:7663-7671). The N434A mutation also counters the poor FcRn affinity that can result from the introduction of mutations that increase binding to FcγRs; N434A is typically added to the mutations S298A/E333A/K334A to create a variant with enhanced FcγR binding and normal or improved FcRn binding. Fc mutations that improve FcRn binding also include N434Y, E294del/T307P/N434Y and T256N/A378V/S383N/N434Y. The E294 deletion results in higher sialylation of the N297 glycan on the Fc, which increases antibody half-life in vivo. Indicating that sialylation also plays a role in regulating serum half-life (see, e.g., Saunders, K. O. (2019) Front. Immunol. 10:1296).

[0636] The replacements M428L/N434S (by EU numbering), when introduced into the humanized anti-VEGF IgG1 antibody bevacizumab (Avastin®), resulted in an 11-fold increase in affinity to FcRn at pH 6.0, and extended the in vivo serum half-life in cynomolgus monkeys from 9.7 days to 31.1 days, representing a 3.2-fold improvement. The M428L/N434S modification resulted in similar increases in FcRn binding and half-life extension when introduced into the anti-EGFR antibody cetuximab, which is rapidly cleared due to receptor-mediated internalization. The half-life extension of these anti-tumor antibodies correlated with enhanced tumor reduction in vivo in a mouse model, indicating that the in vivo therapeutic efficacy of the antibodies is increased when the pharmacokinetics, such as clearance rate, are improved. Other mutations engineered into the bevacizumab Fc include (by EU numbering): N434S, with ˜3-fold improvement in FcRn binding and ˜2.8 fold increase in serum half-life in mice; V259I/V308F, with 46-fold improvement in FcRn binding, and ˜3-fold and ˜2-fold increases in serum half-life in mice and cynomolgus monkeys, respectively; M252Y/S254T/T256E, with ˜7-fold improvement in FcRn binding, and ˜4-fold and 2.5-fold increases in serum half-life in mice and cynomolgus monkeys, respectively; and V259I/V308F/M428L, with ˜20-fold improvement in FcRn binding, and ˜4-5-fold and 2.6-fold increases in serum half-life in mice and cynomolgus monkeys, respectively (Zalevsky et al. (2010) Nat. Biotechnol. 28(2):157-159).

[0637] The above-identified mutations, and other such mutations, can be introduced into the IgG Fc region in constructs provided herein. These include constructs, such as those of Formulae 1 and 2, in which the linker includes an Fc or an Fc dimer, depending upon the structure of the construct.

[0638] In some embodiments, the IgG Fc regions in the constructs herein are modified to enhance neonatal FcR recycling to increase in vivo half-life. This can be effected by mutating residues at the interface of the CH2 and CH3 domains of IgG Fc, which are responsible for binding to FcRn. These include, but are not limited to, the residues T250, L251, M252, I253, S254, T256, V259, T307, V308, L309, H310, L314, Q311, A378, E380, S383, M428, H433, N434, H435 and Y436, by EU numbering. Exemplary Fc modifications that increase binding to FcRn include, but are not limited to, one or more of T250Q, T250R, M252F, M252W, M252Y, S254T, T256D, T256E, T256Q, V259I, V308F, E380A, M428L, H433K, N434F, N434A, N434W, N434S, N434Y, Y436H, M252Y/T256Q, M252F/T256D, M252Y/S254T/T256E, I433K/N434F/Y436I, N434F/Y436I, T250Q/M428L, T250R/M428L, M428L/N434S, V259I/V308F, V259I/V308F/M428L, E294del/T307P/N434Y, T256N/A378V/S383N/N434Y, and combinations thereof by EU numbering. Table 10, below, shows the corresponding mutations by Kabat numbering and sequential numbering, with reference to the sequence of the IgG1 heavy chain constant domain set forth in SEQ TD NO:421. Other modifications, known in the art to confer enhanced or increased FcRn binding also are contemplated for use herein.

TABLE 10
IgG1 Fc Modifications that Enhance FcRn Binding

| | | Modifications by |
|---|---|---|
| Modifications by | Modifications by | sequential Numbering |
| EU Numbering | Kabat Numbering | (SEQ ID NO: 421) |
| T250Q | T263Q | T133Q |
| T250R | T263R | T133R |
| M252F | M265F | M135F |
| M252W | M265W | M135W |
| M252Y | M265Y | M135Y |
| S254T | S267T | S137T |
| T256D | T269D | T139D |
| T256E | T269E | T139E |
| T256Q | T269Q | T139Q |
| V259I | V272I | V142I |
| V308F | V327F | V191F |
| E380A | E405A | E263A |
| M428L | M459L | M311L |
| H433K | H464K | H316K |
| N434F | N465F | N317F |
| N434A | N465A | N317A |
| N434W | N465W | N317W |
| N434S | N465S | N317S |
| N434Y | N465Y | N317Y |
| Y436H | Y467H | Y319H |
| M252Y/T256Q | M265Y/T269Q | M135Y/T139Q |
| M252F/T256D | M265F/T269D | M135F/T139D |
| M252Y/S254T/T256E | M265Y/S267T/T269E | M135Y/S137T/T139E |
| H433K/N434F/Y436H | H464K/N465F/Y467H | H316K/N317F/Y319H |
| N434F/Y436H | N465F/Y467H | N317F/Y319H |
| T250Q/M428L | T263Q/M459L | T133Q/M311L |
| T250R/M428L | T263R/M459L | T133R/M311L |
| M428L/N434S | M459L/N465S | M311L/N317S |
| V259I/V308F | V272I/V327F | V142I/V191F |
| V259I/V308F/M428L | V272I/V327F/M459L | V142I/V191F/M311L |
| E294del/T307P/N434Y | E311del/T326P/N465Y | E177del/T190P/N317Y |
| T256N/A378V/S383N/N434Y | T269N/A401V/S408N/N465Y | T139N/A261V/S266N/N317Y |

f. Other ECD Polypeptides and Alternatively Spliced Polypeptide Isoforms

[0639] Other ECD polypeptides for use in the formation of ECD multimers provided herein include any isoform containing an ECD portion of a CSR, or fragment thereof, and optionally additional amino acids that do not align with domain sequence of a cognate receptor. Such ECD polypeptides include, for example, alternatively spliced CSRs or other RTKs. Typically, an ECD-containing polypeptide isoform binds ligand and/or dimerizes with a cell surface receptor. Alternatively spliced isoforms include those generated, for example, by exon extension, exon insertion, exon deletion, exon truncation, or intron retention. Such alternatively spliced isoforms are known in the art (see for e.g., U.S. Pat. No. 6,414,130; published U.S. Patent Application Nos. US2005/0239088, US2004/0022785A1, US20050123538; published International Patent Application Nos. WO0044403, WO0161356, and WO0214470) and set forth in any one of SEQ ID NOs: 22, 129, 131, 133, 135, 136, 137, 138, 139, 143, 144, 149, 150, 151, 301-399, and 408-413. For example, alternatively spliced isoforms include isoforms of HER1 including, but not limited to, any set forth in SEQ ID NO: 129, 131, or 133; isoforms of HER2 including, but not limited to herstatin or variants thereof set forth in any of SEQ ID NOs: 135 or 385-399 or other alternatively spliced isoforms, including but not limited to any set forth in SEQ ID NO: 136-139, or 408-413; isoforms of HER3 including, but not limited to, any set forth in SEQ ID NOs: 22, 143, 144, 149, 150, or 151.

[0640] Alternatively spliced isoforms also can include other isoforms of a HER1 gene. The HER1 gene (SEQ ID NO:400) is composed of 28 exons interrupted by 27 introns. In the exemplary genomic sequence of HER1 provided herein as SEQ ID NO:400, exon 1 includes nucleotides 1-254, including the 5′-untranslated region. The start codon begins at nucleotide position 167. Intron 1 includes nucleotides 255-614; exon 2 includes nucleotides 615-766; intron 2 includes nucleotides 767-1126; exon 3 includes nucleotides 1127-1310; intron 3 includes nucleotides 1311-1670; exon 4 includes nucleotides 1671-1805; intron 4 includes nucleotides 1806-2165; exon 5 includes nucleotides 2166-2234; intron 5 includes nucleotides 2235-2594; exon 6 includes nucleotides 2595-2713; intron 6 includes nucleotides 2714-3073; exon 7 includes nucleotides 3074-3215; intron 7 includes nucleotides 3216-3575; exon 8 includes nucleotides 3576-3692; intron 8 includes nucleotides 3693-4052; exon 9 includes nucleotides 4043-4179; intron 9 includes nucleotides 4180-4539; exon 10 includes nucleotides 4540-4613; intron 10 includes nucleotides 4614-4973; exon 11 includes nucleotides 4974-5063; intron 11 includes nucleotides 5064-5423; exon 12 includes nucleotides 5424-5623; intron 12 includes nucleotides 5624-5983; exon 13 includes nucleotides 5984-6116; intron 13 includes nucleotides 6117-6476; exon 14 includes nucleotides 6477-6567; intron 14 includes nucleotides 6568-6927; exon 15 includes nucleotides 6928-7085; intron 15 includes nucleotides 7086-7445; exon 16 includes nucleotides 7446-7484; intron 16 includes nucleotides 7485-7844; exon 17 includes nucleotides 7845-7988; intron 17 includes nucleotides 7987-8346; exon 18 includes nucleotides 8347-8469; intron 18 includes nucleotides 8470-8829; exon 19 includes nucleotides 8830-8295; intron 19 includes nucleotides 8929-9288; exon 20 includes nucleotides 9289-9474; intron 20 includes nucleotides 9475-9834; exon 21 includes nucleotides 9835-9990; intron 21 includes nucleotides 9991-10350; exon 22 includes nucleotides 10351-10426; intron 22 includes nucleotides 10427-10786; exon 23 includes nucleotides 10787-10933; intron 23 includes nucleotides 10934-11293; exon 24 includes nucleotides 11294-11391; intron 24 includes nucleotides 11392-11751; exon 25 includes nucleotides 11752-11919; intron 26 includes nucleotides 11920-12279; exon 26 includes nucleotides 12280-12327; intron 26 includes nucleotides 12328-12687; exon 27 includes nucleotides 12688-12796; intron 27 includes nucleotides 12797-13156; and exon 28 includes nucleotides 13157-15233. The stop codon in exon 28 begins at nucleotide position 13516, and the remainder of exon 28 includes the 3′-untranslated region. Following RNA splicing and the removal of the introns, the primary transcript of HER1 contains exons 1-28 and encodes a polypeptide of 1210 amino acids (SEQ ID NO:2). Alternative spliced isoforms of the HER1 gene are described and set forth in Example 10, and include isoform with a retained intron sequence. A sequence of such an exemplary HER1 isoforms is set forth in SEQ ID NO:126, and encodes a polypeptide having an amino acid sequence set forth in SEQ ID NO:127.

[0641] Alternatively spliced isoforms also can include other isoforms of a HER2 gene. The HER2 gene (SEQ ID NO:401) is composed of 27 exons interrupted by 26 introns. In the exemplary genomic sequence of HER provided herein as SEQ ID NO:401, exon 1 includes nucleotides 181-349, including the 5′-untranslated region. The start codon begins at nucleotide position 277. Intron 1 includes nucleotides 350-709; exon 2 includes nucleotides 710-861; intron 2 includes nucleotides 862-1221; exon 3 includes nucleotides 1222-1435; intron 3 includes nucleotides 1436-1795; exon 4 includes nucleotides 1796-1930; intron 4 includes nucleotides 1931-2290; exon 5 includes nucleotides 2291-2359; intron 5 includes nucleotides 2360-2719; exon 6 includes nucleotides 2720-2835; intron 6 includes nucleotides 2836-3195; exon 7 includes nucleotides 3196-3337; intron 7 includes nucleotides 3338-3697; exon 8 includes nucleotides 3698-3817; intron 8 includes nucleotides 3818-4177; exon 9 includes nucleotides 4178-4304; intron 9 includes nucleotides 4305-4664; exon 10 includes nucleotides 4665-4738; intron 10 includes nucleotides 4739-5098; exon 11 includes nucleotides 5099-5189; intron 11 includes nucleotides 5190-5549; exon 12 includes nucleotides 5550-5749; intron 12 includes nucleotides 5750-6109; exon 13 includes nucleotides 6110-6242; intron 13 includes nucleotides 6243-6602; exon 14 includes nucleotides 6603-6696; intron 14 includes nucleotides 6694-7053; exon 15 includes nucleotides 7054-7214; intron 15 includes nucleotides 7215-7574; exon 16 includes nucleotides 7575-7622; intron 16 includes nucleotides 7623-7982; exon 17 includes nucleotides 7983-8121; intron 17 includes nucleotides 8122-8481; exon 18 includes nucleotides 8482-8604; intron 18 includes nucleotides 8605-8964; exon 19 includes nucleotides 8695-9067; intron 19 includes nucleotides 9068-9427; exon 20 includes nucleotides 9428-9610; intron 20 includes nucleotides 9611-9970; exon 21 includes nucleotides 9971-10126; intron 21 includes nucleotides 10127-10486; exon 22 includes nucleotides 10487-10562; intron 22 includes nucleotides 10563-10922; exon 23 includes nucleotides 10923-11069; intron 23 includes nucleotides 11070-11429; exon 24 includes nucleotides 11430-11527; intron 24 includes nucleotides 11528-11887; exon 25 includes nucleotides 11888-12076; intron 26 includes nucleotides 12077-12436; exon 26 includes nucleotides 12437-12689; intron 26 includes nucleotides 12690-13049 and exon 27 includes nucleotides 13050-14018. The stop codon in exon 27 begins at nucleotide position 13403, and the remainder of exon 27 includes the 3-untranslated region. Following RNA splicing and the removal of the introns, the primary transcript of HER2 contains exons 1-27 and encodes a polypeptide of 1255 amino acids (SEQ ID NO:4). Alternative spliced isoforms of the HER2 gene are described in set forth in Example 10, and include those with a retained intron sequence. A sequence of such an exemplary HER2 isoforms is set forth in SEQ ID NO:140, and encodes a polypeptide having an amino acid sequence set forth in SEQ ID NO:141.

[0642] Alternatively spliced isoforms also can include other isoforms of a HER3 gene. The HER3 gene (SEQ ID NO:402) is composed of 28 exons interrupted by 27 introns. In the exemplary genomic sequence of HER3 provided herein as SEQ ID NO:402, exon 1 includes nucleotides 181-460, including the 5′-untranslated region. The start codon begins at nucleotide position 379. Intron 1 includes nucleotides 461-820; exon 2 includes nucleotides 821-972; intron 2 includes nucleotides 973-1332; exon 3 includes nucleotides 1333-1519; intron 3 includes nucleotides 1520-1879; exon 4 includes nucleotides 1880-2005; intron 4 includes nucleotides 2006-2365; exon 5 includes nucleotides 2366-2431; intron 5 includes nucleotides 2432-2791; exon 6 includes nucleotides 2792-2910; intron 6 includes nucleotides 2911-3270; exon 7 includes nucleotides 3237-3412; intron 7 includes nucleotides 3413-3772; exon 8 includes nucleotides 3773-3886; intron 8 includes nucleotides 3887-4246; exon 9 includes nucleotides 4247-4367; intron 9 includes nucleotides 4368-4727; exon 10 includes nucleotides 4728-4801; intron 10 includes nucleotides 4802-5161; exon 11 includes nucleotides 5162-5252; intron 11 includes nucleotides 5253-5612; exon 12 includes nucleotides 5613-5818; intron 12 includes nucleotides 5819-6178; exon 13 includes nucleotides 6179-6311; intron 13 includes nucleotides 6312-6671; exon 14 includes nucleotides 6672-6762; intron 14 includes nucleotides 6763-7122; exon 15 includes nucleotides 7123-7277; intron 15 includes nucleotides 7278-7637; exon 16 includes nucleotides 7638-7691; intron 16 includes nucleotides 7692-8051; exon 17 includes nucleotides 8052-8193; intron 17 includes nucleotides 8194-8553; exon 18 includes nucleotides 8554-8673; intron 18 includes nucleotides 8674-9033; exon 19 includes nucleotides 9034-9132; intron 19 includes nucleotides 9133-9492; exon 20 includes nucleotides 9493-9678; intron 20 includes nucleotides 9679-10038; exon 21 includes nucleotides 10039-10194; intron 21 includes nucleotides 10195-10554; exon 22 includes nucleotides 10555-10630; intron 22 includes nucleotides 10631-10990; exon 23 includes nucleotides 10991-11137; intron 23 includes nucleotides 11138-11497; exon 24 includes nucleotides 11498-11595; intron 24 includes nucleotides 11596-11955; exon 25 includes nucleotides 11956-12147; intron 26 includes nucleotides 12148-12507; exon 26 includes nucleotides 12508-12579; intron 26 includes nucleotides 12580-12939; exon 27 includes nucleotides 12940-13240; intron 27 includes nucleotides 13241-13600; and exon 28 includes nucleotides 13601-14875. The stop codon in exon 28 begins at nucleotide position 14125, and the remainder of exon 28 includes the 3′-untranslated region. Following RNA splicing and the removal of the introns, the primary transcript of ErbB3 contains exons 1-28 and encodes a polypeptide of 1342 amino acids (SEQ ID NO:6). Alternative spliced isoforms of the HER3 gene are described in set forth in Example 10, and include those with a retained intron sequence. Sequences of such exemplary HER3 isoforms are set forth in SEQ ID NO:145 and 147, and encodes a polypeptide having an amino acid sequence set forth in SEQ ID NO:146 and 148, respectively.

[0643] Alternatively spliced isoforms also can include other isoforms of a HER4 gene. The HER4 gene (SEQ ID NO:403) is composed of 28 exons interrupted by 27 introns. In the exemplary genomic sequence of HER4 provided herein as SEQ ID NO:403, exon 1 includes nucleotides 181-295, including the 5′-untranslated region. The start codon begins at nucleotide position 215. Intron 1 includes nucleotides 296-655; exon 2 includes nucleotides 656-807; intron 2 includes nucleotides 808-1167; exon 3 includes nucleotides 1168-1354; intron 3 includes nucleotides 1355-1714; exon 4 includes nucleotides 1715-1849; intron 4 includes nucleotides 1850-2209; exon 5 includes nucleotides 2210-2275; intron 5 includes nucleotides 2276-2635; exon 6 includes nucleotides 2636-2754; intron 6 includes nucleotides 2755-3114; exon 7 includes nucleotides 3115-3256; intron 7 includes nucleotides 3257-3616; exon 8 includes nucleotides 3617-3730; intron 8 includes nucleotides 3731-4090; exon 9 includes nucleotides 4091-4217; intron 9 includes nucleotides 4218-4577; exon 10 includes nucleotides 4578-4651; intron 10 includes nucleotides 4652-5011; exon 11 includes nucleotides 5012-5102; intron 11 includes nucleotides 5103-5462; exon 12 includes nucleotides 5463-5662; intron 12 includes nucleotides 5663-6022; exon 13 includes nucleotides 6023-6155; intron 13 includes nucleotides 6156-6515; exon 14 includes nucleotides 6516-6609; intron 14 includes nucleotides 6610-6969; exon 15 includes nucleotides 6970-7124; intron 15 includes nucleotides 7125-7484; exon 16 includes nucleotides 7485-7559; intron 16 includes nucleotides 7560-7919; exon 17 includes nucleotides 7920-8052; intron 17 includes nucleotides 8053-8412; exon 18 includes nucleotides 8413-8535; intron 18 includes nucleotides 8536-8895; exon 19 includes nucleotides 8896-8994; intron 19 includes nucleotides 8995-9354; exon 20 includes nucleotides 9355-9540; intron 20 includes nucleotides 9541-9900; exon 21 includes nucleotides 9901-10056; intron 21 includes nucleotides 10057-10416; exon 22 includes nucleotides 10417-10492; intron 22 includes nucleotides 10493-10852; exon 23 includes nucleotides 10853-10999; intron 23 includes nucleotides 11000-11359; exon 24 includes nucleotides 11360-11457; intron 24 includes nucleotides 11458-11817; exon 25 includes nucleotides 11818-11988; intron 26 includes nucleotides 11989-12348; exon 26 includes nucleotides 12349-12396; intron 26 includes nucleotides 12397-12756; exon 27 includes nucleotides 12757-13054; intron 27 includes nucleotides 13055-13414; and exon 28 includes nucleotides 13415-15385. The stop codon in exon 28 begins at nucleotide position 13858, and the remainder of exon 28 includes the 3′-untranslated region. Following RNA splicing and the removal of the introns, the primary transcript of HER4 contains exons 1-28 and encodes a polypeptide of 1308 amino acids (SEQ ID NO:8). Alternatively spliced isoforms of the HER4 gene are described in set forth in Example 10, and include those with a retained intron sequence. Sequences of such exemplary HER4 isoforms are set forth in SEQ ID NOs:152, 154, 156, or 158, and encodes a polypeptide having an amino acid sequence set forth in SEQ ID NOs:153, 155, 157, or 159, respectively.

[0644] Alternatively spliced isoforms also can include an isoform of an IGF-1R gene. The IGF1-R gene (SEQ ID NO:404) is composed of 21 exons interrupted by 20 introns. In the exemplary genomic sequence of IGF1-R provided herein as SEQ ID NO:404, exon 1 includes nucleotides 181-306, including the 5′-untranslated region. The start codon begins at nucleotide position 213. Intron 1 includes nucleotides 307-666; exon 2 includes nucleotides 667-1212; intron 2 includes nucleotides 1213-1572; exon 3 includes nucleotides 1573-1884; intron 3 includes nucleotides 1885-2255; exon 4 includes nucleotides 2256-2394; intron 4 includes nucleotides 2395-2754; exon 5 includes nucleotides 2755-2899; intron 5 includes nucleotides 2990-3259; exon 6 includes nucleotides 3260-3474; intron 6 includes nucleotides 3475-3834; exon 7 includes nucleotides 3835-3961; intron 7 includes nucleotides 3962-4321; exon 8 includes nucleotides 4322-4560; intron 8 includes nucleotides 4561-4920; exon 9 includes nucleotides 4921-5088; intron 9 includes nucleotides 5089-5448; exon 10 includes nucleotides 5449-5653; intron 10 includes nucleotides 5654-6013; exon 11 includes nucleotides 6014-6297; intron 11 includes nucleotides 6298-6657; exon 12 includes nucleotides 6658-6794; intron 12 includes nucleotides 6795-7154; exon 13 includes nucleotides 7155-7314; intron 13 includes nucleotides 7315-7674; exon 14 includes nucleotides 7675-7777; intron 14 includes nucleotides 7778-8137; exon 15 includes nucleotides 8138-8208; intron 15 includes nucleotides 8209-8568; exon 16 includes nucleotides 8569-8798; intron 16 includes nucleotides 8799-9158; exon 17 includes nucleotides 9159-9269; intron 17 includes nucleotides9270-9629; exon 18 includes nucleotides 9630-9789; intron 18 includes nucleotides 9790-10149; exon 19 includes nucleotides 10150-10279; intron 19 includes nucleotides 10280-10639; exon 20 includes nucleotides 10640-10774; intron 20 includes nucleotides 10775-11134 and exon 21 includes nucleotides 11135-12356. The stop codon in exon 21 begins at nucleotide position 11514, and the remainder of exon 21 includes the 3′-untranslated region. Following RNA splicing and the removal of the introns, the primary transcript of IGF1-R contains exons 1-21 and encodes a polypeptide of 1367 amino acids (SEQ ID NO:290). Alternative spliced isoforms of the IGF1-R gene are described in set forth in Example 11, and include those with a retained intron sequence. Sequence of such exemplary IGF1-R isoforms are set forth in SEQ ID NOs:297 or 299, and encodes a polypeptide having an amino acid sequence set forth in SEQ ID NOs:298 or 300, respectively.

[0645] The alternative spliced isoforms of HER1, HER2, HER3, HER4, and IGF1-R provided herein and set forth in SEQ ID NOs:127, 141, 146, 148, 153, 155, 157, 159, 298, or 300 can be used in the formation of an ECD multimer provided herein. Alternatively, the isoforms can be used alone or in combination with any other isoform, for the treatment of any diseases mediated by their cognate receptor. Exemplary of such diseases are any angiogenic, tumorigenic, or inflammatory disease, in particular cancers, such as are described herein and known to one of skill in the art.

### 2. Formation of ECD Multimers

[0646] ECD multimers, including HER ECD multimers, can be covalently-linked, non-covalently-linked, or chemically linked multimers of receptor ECDs, to form dimers, trimers, or higher multimers. In some instances, multimers can be formed by dimerization of two or more ECD polypeptides. Multimerization between two ECD polypeptides can be spontaneous, or can occur due to forced linkage of two or more polypeptides. In one example, multimers can be linked by disulfide bonds formed between cysteine residues on different ECD polypeptides. In another example, multimers can include an ECD polypeptide joined via covalent or non-covalent interactions to peptide moieties fused to the soluble polypeptide. Such peptides can be peptide linkers (spacers), or peptides that have the property of promoting multimerization. In an additional example, multimers can be formed between two polypeptides through chemical linkage, such as for example, by using heterobifunctional linkers.

a. Peptide Linkers

[0647] Peptide linkers can be used to produce polypeptide multimers, such as for example a multimer where one multimerization partner is all or a part of an ECD of a HER family receptor. In one example, peptide linkers can be fused to the C-terminal end of a first polypeptide and the N-terminal end of a second polypeptide. This structure can be repeated multiples times such that at least one, preferably 2, 3, 4, or more soluble polypeptides are linked to one another via peptide linkers at their respective termini. For example, a multimer polypeptide can have a sequence Z_{1-X}-Z₂, where Z₁ and Z₂ are each a sequence of all or part of an ECD of a cell surface polypeptide and where X is a sequence of a peptide linker. In some instances, Z₁ and/or Z₂ is all or part of an ECD of a HER family receptor. In another example, Z₁ and Z₂ are the same or they are different. In another example, the polypeptide has a sequence of Z₁-X-Z₂ (-X-Z)ₙ, where “n” is any integer, i.e., generally 1 or 2.

[0648] Typically, the peptide linker is of sufficient length to allow a soluble ECD polypeptide to form bonds with an adjacent soluble ECD polypeptide. Examples of peptide linkers include -Gly-Gly-, GGGGG (SEQ ID NO:273), GGGGS or (GGGGS)ₙ (SEQ ID NO:174), SSSSG or (SSSSG)ₙ (SEQ ID NO:187), GKSSGSGSESKS (SEQ ID NO:175), GGSTSGSGKSSEGKG (SEQ ID NO: 176), GSTSGSGKSSSEGSGSTKG (SEQ ID NO: 177), GSTSGSGKPGSGEGSTKG (SEQ ID NO: 178), EGKSSGSGSESKEF (SEQ ID NO: 179), or AlaAlaProAla or (AlaAlaProAla)ₙ (SEQ ID NO:188), where n is 1 to 6, such as 1, 2, 3, or 4. Exemplary linkers include:

(1) Gly4Ser with NcoI ends
SEQ ID NO: 189
CCATGGGCGG CGGCGGCTCT GCCATGG
(2) (Gly4Ser)2 with NcoI ends
SEQ ID NO: 190
CCATGGGCGG CGGCGGCTCT GGCGGCGGCG GCTCTGCCAT GG
(3) (Ser4Gly)4 with NcoI ends
SEQ ID NO: 191
CCATGGCCTC GTCGTCGTCG GGCTCGTCGT CGTCGGGCTC
GTCGTCGTCG GGCTCGTCGT CGTCGGGCGC CATGG
(4) (Ser4Gly)2 with NcoI ends
SEQ ID NO: 192
CCATGGCCTC GTCGTCGTCG GGCTCGTCGT CGTCGGGCGC CATGG

[0649] Linking moieties are described, for example, in Huston et al. (1988) Proc. Natl. Acad. Sci. U.S.A. 85:5879-5883, Whitlow et al. (1993) Protein Engineering 6:989-995, and Newton et al., (1996) Biochemistry 35:545-553. Other suitable peptide linkers include any of those described in U.S. Pat. No. 4,751,180 or 4,935,233, which are hereby incorporated by reference. A polynucleotide encoding a desired peptide linker can be inserted between, and in the same reading frame as a polynucleotide encoding a soluble ECD polypeptide, using any suitable conventional technique. In one example, a fusion polypeptide has from two to four soluble ECD polypeptides, including one that is all or part of a HER ECD polypeptide, separated by peptide linkers.

b. Heterobifunctional Linking Agents

[0650] Linkage of an ECD polypeptide to another ECD polypeptide to create a heteromultimeric fusion polypeptide can be direct or indirect. For example, linkage of two or more ECD polypeptides can be achieved by chemical linkage or facilitated by heterobifunctional linkers, such as any known in the art or provided herein. Numerous heterobifunctional cross-linking reagents that are used to form covalent bonds between amino groups and thiol groups and to introduce thiol groups into proteins, are known to those of skill in this art (see, e.g., the PIERCE CATALOG, ImmunoTechnology Catalog & Handbook, 1992-1993, which describes the preparation of and use of such reagents and provides a commercial source for such reagents; see, also, e.g., Cumber et al. (1992) Bioconjugate Chem. 3:397-401; Thorpe et al. (1987) Cancer Res. 47:5924-5931; Gordon et al. (1987) Proc. Natl. Acad Sci. 84:308-312; Walden et al. (1986) J. Mol. Cell Immunol. 2:191-197; Carlsson et al. (1978) Biochem. J. 173: 723-737; Mahan et al. (1987) Anal. Biochem. 162:163-170; Wawryznaczak et al. (1992) Br. J. Cancer 66:361-366; Fattom et al. (1992) Infection & Immun. 60:584-589). These reagents can be used to form covalent bonds between the N-terminal portion of an ECD polypeptide and C-terminus portion of another ECD polypeptide or between each of those portions and a linker. These reagents include, but are not limited to: N-succinimidyl-3-(2-pyridyldithio)propionate (SPDP; disulfide linker); sulfosuccinimidyl 6-[3-2-pyridyldithio)propionamido]hexanoate (sulfo-LC-SPDP); succinimidyloxycarbonyl-α-methyl benzyl thiosulfate (SMBT, hindered disulfate linker); succinimidyl 6-[3-(2-pyridyldithio)propionamido]hexanoate (LC-SPDP); sulfosuccinimidyl 4-(N-maleimidomethyl)cyclohexane-1-carboxylate (sulfo-SMCC); succinimidyl 3-(2-pyridyldithio)butyrate (SPDB; hindered disulfide bond linker); sulfosuccinimidyl 2-(7-azido-4-methylcoumarin-3-acetamide) ethyl-1,3′-dithiopropionate (SAED); sulfo-succinimidyl 7-azido-4-methylcoumarin-3-acetate (SAMCA); sulfosuccinimidyl-6-[alpha-methyl-alpha-(2-pyridyldithio)toluamido]-hexanoate (sulfo-LC-SMPT); 1,4-di-[3′-(2′-pyridyldithio)propionamido]butane (DPDPB); 4-succinimidyloxycarbonyl-α-methyl-α-(2-pyridylthio)-toluene (SMPT, hindered disulfate linker); sulfosuccinimidyl-6-[α-methyl-α-(2-pyrimiyldi-thio)toluamido]hexanoate (sulfo-LC-SMPT); m-maleimidobenzoyl-N-hydroxy-succinimide ester (MBS); m-maleimidobenzoyl-N-hydroxysulfo-succinimide ester (sulfo-MBS); N-succinimidyl(4-iodoacetyl)aminobenzoate (SIAB; thioether linker); sulfosuccinimidyl-(4-iodoacetyl)amino benzoate (sulfo-SIAB); succinimidyl-4-(p-maleimi-dophenyl)butyrate (SMPB); sulfosuccinimidyl4-(p-maleimido-phenyl)butyrate (sulfo-SMPB); azidobenzoyl hydrazide (ABH). These linkers, for example, can be used in combination with peptide linkers, such as those that increase flexibility or solubility or that provide for or eliminate steric hindrance. Any other linkers known to those of skill in the art for linking a polypeptide molecule to another molecule can be employed. General properties are such that the resulting molecule is biocompatible (for administration to animals, including humans) and such that the resulting molecule is a heteromultimeric molecule that modulates the activity of a cell surface molecule, such as a HER, or other cell surface molecule or receptor. Of interest herein, are linkers and methods that result in the mixture of species.

c. Polypeptide Multimerization Domains

[0651] Interaction of two or more polypeptides can be facilitated by their linkage, either directly or indirectly, to any moiety or other polypeptide that are themselves able to interact to form a stable structure. For example, separate encoded polypeptide chains can be joined by multimerization, whereby multimerization of the polypeptides is mediated by a multimerization domain. Typically, the multimerization domain provides for the formation of a stable protein-protein interaction between a first chimeric polypeptide and a second chimeric polypeptide. Chimeric polypeptides include, for example, linkage (directly or indirectly) of a nucleic acid encoding an ECD portion of a polypeptide with a nucleic acid encoding a multimerization domain. Typically, at least one multimerization partner is a nucleic acid encoding all of part of a HER ECD linked directly or indirectly to a multimerization domain. Homo- or heteromultimeric polypeptides can be generated from co-expression of separate chimeric polypeptides. The first and second chimeric polypeptides can be the same or different.

[0652] Generally, a multimerization domain includes any capable of forming a stable protein-protein interaction. The multimerization domains can interact via an immunoglobulin sequence, leucine zipper, a hydrophobic region, a hydrophilic region, or a free thiol which forms an intermolecular disulfide bond between the chimeric molecules of a homo- or heteromultimer. In addition, a multimerization domain can include an amino acid sequence such as is described, for example, in U.S. patent application Ser. No. 08/399,106. A multimerization region can be engineered such that steric interactions promote stable interaction, or that further promote the formation of heterodimers over homodimers from a mixture of chimeric monomers.

[0653] An ECD chimeric polypeptide, such as for example any provided herein, can be joined anywhere, but typically via its N- or C-terminus, to the N- or C-terminus of a multimerization domain to form a chimeric polypeptide. The linkage can be direct or indirect via a linker. Also, the chimeric polypeptide can be a fusion protein or can be formed by chemical linkage, such as through covalent or non-covalent interactions. For example, when preparing a chimeric polypeptide containing a multimerization domain, nucleic acid encoding all or part of an ECD of a polypeptide can be operably linked to nucleic acid encoding the multimerization domain sequence, directly or indirectly or optionally via a linker domain. Typically, the construct encodes a chimeric protein where the C-terminus of the ECD polypeptide is joined to the N-terminus of the multimerization domain. In some instances, a construct can encode a chimeric protein where the N-terminus of the ECD polypeptide is joined to the N- or C-terminus of the multimerization domain.

[0654] A polypeptide multimer contains two chimeric proteins created by linking, directly or indirectly, two of the same or different ECD polypeptides directly or indirectly to a multimerization domain. In some examples, where the multimerization domain is a polypeptide, a gene fusion encoding the ECD-multimerization domain chimeric polypeptide is inserted into an appropriate expression vector. The resulting ECD-multimerization domain chimeric proteins can be expressed in host cells transformed with the recombinant expression vector, and allowed to assemble into multimers, where the multimerization domains interact to form multivalent polypeptides. Chemical linkage of multimerization domains to ECD polypeptides can be effected using heterobifunctional linkers as discussed above.

[0655] The resulting chimeric polypeptides, and multimers formed therefrom, can be purified by any suitable method such as is described in detail in Section F below, such as, for example, by affinity chromatography over Protein A or Protein G columns. Where two nucleic acid molecules encoding different ECD chimeric polypeptides are transformed into cells, formation of homo- and heterodimers will occur. Conditions for expression can be adjusted so that heterodimer formation is favored over homodimer formation.

d. Multimerization Domains, Immunoglobulin Domain

[0656] Multimerization domains include those comprising a free thiol moiety capable of reacting to form an intermolecular disulfide bond with a multimerization domain of an additional amino acid sequence. For example, a multimerization domain can include a portion of an immunoglobulin molecule, such as from IgG1, IgG2, IgG3, IgG4, IgA, IgD, IgM, and IgE. Generally, such a portion is an immunoglobulin constant region (Fc). Preparations of fusion proteins containing soluble ECD polypeptides fused to various portions of antibody-derived polypeptides (including the Fc domain) have been described, see e.g., Ashkenazi et al. (1991) PNAS 88: 10535; Byrn et al. (1990) Nature, 344:677; and Hollenbaugh and Aruffo, (1992) “Construction of Immunoglobulin Fusion Proteins,” in Current Protocols in Immunology, Suppl. 4, pp. 10.19.1-10.19.11. See also, the detailed discussion in Section F below, which describes and provides modified Fc domains with altered activities and properties. These modified Fc domains are included in constructs provided herein.

[0657] Antibodies bind to specific antigens and contain two identical heavy chains and two identical light chains covalently linked by disulfide bonds. Both the heavy and light chains contain variable regions, which bind the antigen, and constant (C) regions. In each chain, one domain (V) has a variable amino acid sequence depending on the antibody specificity of the molecule. The other domain (C) has a rather constant sequence common among molecules of the same class. The domains are numbered in sequence from the amino-terminal end. For example, the IgG light chain is composed of two immunoglobulin domains linked from N- to C-terminus in the order V_{L}-C_{L}, referring to the light chain variable domain and the light chain constant domain, respectively. The IgG heavy chain is composed of four immunoglobulin domains linked from the N- to C-terminus in the order V_{H}-C_{H1}-C_{H2}-C_{H3}, referring to the variable heavy domain, contain heavy domain 1, constant heavy domain 2, and constant heavy domain 3. The resulting antibody molecule is a four-chain molecule where each heavy chain is linked to a light chain by a disulfide bond, and the two heavy chains are linked to each other by disulfide bonds. Linkage of the heavy chains is mediated by a flexible region of the heavy chain, known as the hinge region. Fragments of antibody molecules can be generated, such as for example, by enzymatic cleavage. For example, upon protease cleavage by papain, a dimer of the heavy chain constant regions, the Fc domain, is cleaved from the two Fab regions (i.e., the portions containing the variable regions).

[0658] In humans, there are five antibody isotypes classified based on their heavy chains denoted as delta (δ), gamma (γ), mu (μ) and alpha (α) and epsilon (ε), giving rise to the IgD, IgG, IgM, IgA, and IgE classes of antibodies, respectively. The IgA and IgG classes contain the subclasses IgA1, IgA2, IgG1, IgG2, IgG3, and IgG4. Sequence differences between immunoglobulin heavy chains cause the various isotypes to differ in, for example, the number of C domains, the presence of a hinge region, and the number and location of interchain disulfide bonds. For example, IgM and IgE heavy chains contain an extra C domain (C4), that replaces the hinge region. The Fc regions of IgG, IgD, and IgA pair with each other through their Cγ3, CΔ3, and Cα3 domains, whereas the Fc regions of IgM and IgE dimerize through their Cμ4 and Cε4 domains. IgM and IgA form multimeric structures with ten and four antigen-binding sites, respectively.

[0659] ECD immunoglobulin chimeric polypeptides provided herein include a full-length immunoglobulin polypeptide. Alternatively, the immunoglobulin polypeptide is less than full length, i.e., containing a heavy chain, light chain, Fab, Fab2, Fv, or Fc. In one example, the ECD immunoglobulin chimeric polypeptides are assembled as monomers or hetero- or homo-multimers, and particularly as dimer or tetramers. Chains or basic units of varying structures can be utilized to assemble the monomers and hetero- and homo-multimers. For example, an ECD polypeptide can be fused to all or part of an immunoglobulin molecule, including all or part of C_{H}, C_{L}, V_{H}, or V_{L} domain of an immunoglobulin molecule (see. e.g., U.S. Pat. No. 5,116,964). Chimeric ECD polypeptides can be readily produced and secreted by mammalian cells transformed with the appropriate nucleic acid molecule. The secreted forms include those where the ECD polypeptide is present in heavy chain dimers; light chain monomers or dimers; and heavy and light chain heterotetramers where the ECD polypeptide is fused to one or more light or heavy chains, including heterotetramers where up to and including all four variable regions analogues are substituted. In some examples, one or more than one nucleic acid fusion molecule can be transformed into host cells to produce a multimer where the ECD portions of the multimer are the same or different. In some examples, a non-ECD polypeptide light-heavy chain variable-like domain is present, thereby producing a heterobifunctional antibody. In some examples, a chimeric polypeptide can be made fused to part of an immunoglobulin molecule lacking hinge disulfides, in which non-covalent or covalent interactions of the two ECDs polypeptide portions associate the molecule into a homo- or heterodimer.

i. Fc Domain

[0660] Typically, the immunoglobulin portion of an ECD chimeric protein includes the heavy chain of an immunoglobulin polypeptide, most usually the constant domains of the heavy chain. Exemplary sequences of heavy chain constant regions for human IgG sub-types are set forth in SEQ ID NOs:163 (IgG1), SEQ ID NO:164 (IgG2), SEQ ID NO:165 (IgG3), and SEQ ID NO: 166 (IgG4). For example, for the exemplary heavy chain constant region set forth in SEQ ID NO:163, the CH1 domain corresponds to amino acids 1-98, the hinge region corresponds to amino acids 99-110, the CH2 domain corresponds to amino acids 111-223, and the CH3 domain corresponds to amino acids 224-330. See, also Section F, below.

[0661] In one example, an immunoglobulin polypeptide chimeric protein can include the Fc region of an immunoglobulin polypeptide. Typically, such a fusion retains at least a functionally active hinge, C_{H2} and C_{H3} domains of the constant region of an immunoglobulin heavy chain. For example, a full-length Fc sequence of IgG1 includes amino acids 99-330 of the sequence set forth in SEQ ID NO:163. An exemplary Fc sequence for hIgG1 is set forth in SEQ ID NO: 167, and contains almost all of the hinge sequence corresponding to amino acids 100-110 of SEQ ID NO:163, and the complete sequence for the CH2 and CH3 domain as set forth in SEQ ID NO:163. Another exemplary Fc polypeptide is set forth in PCT application WO 93/10151, and is a single chain polypeptide extending from the N-terminal hinge region to the native C-terminus of the Fc region of a human IgG1 antibody (SEQ ID NO:168). The precise site at which the linkage is made is not critical: particular sites are well known and can be selected in order to optimize the biological activity, secretion, or binding characteristics of the ECD polypeptide. For example, other exemplary Fc polypeptide sequences begin at amino acid C109 or P113 of the sequence set forth in SEQ ID NO: 163 (see e.g., US 2006/0024298).

[0662] In addition to hIgG1 Fc, other Fc regions also can be included in the ECD chimeric polypeptides provided herein. For example, where effector functions mediated by Fc/FcγR interactions are to be minimized, fusion with IgG isotypes that poorly recruit complement or effector cells, such as for example, the Fc of IgG2 or IgG4, is contemplated. Additionally, the Fc fusions can contain immunoglobulin sequences that are substantially encoded by immunoglobulin genes belonging to any of the antibody classes, including, but not limited to IgG (including human subclasses IgG1, IgG2, IgG3, or IgG4), IgA (including human subclasses IgA1 and IgA2), IgD, IgE, and IgM classes of antibodies. Further, linkers can be used to covalently link Fc to another polypeptide to generate an Fc chimera.

[0663] Modified Fc domains also are contemplated herein for use in chimeras with ECD polypeptides, see e.g., U.S. Patent Publication No. US 2006/0024298; and International Patent Publication No. WO 2005/063816 for exemplary modifications. In some examples, the Fc region is such that it has altered (i.e., more or less) effector function than the effector function of an Fc region of a wild-type immunoglobulin heavy chain. The Fc regions of an antibody interacts with a number of Fc receptors, and ligands, imparting an array of important functional capabilities referred to as effector functions. Fc effector functions include, for example, Fc receptor binding, complement fixation, and T cell depleting activity (see e.g., U.S. Pat. No. 6,136,310). Methods of assaying T cell depleting activity, Fc effector function, and antibody stability are known in the art. For example, the Fc region of an IgG molecule interacts with the FcγRs. These receptors are expressed in a variety of immune cells, including for example, monocytes, macrophages, neutrophils, dendritic cells, eosinophils, mast cells, platelets, B cells, large granular lymphocytes, Langerhans' cells, natural killer (NK) cells, and T6T cells. Formation of the Fc/FcγR complex recruits these effector cells to sites of bound antigen, typically resulting in signaling events within the cells and important subsequent immune responses such as release of inflammation mediators, B cell activation, endocytosis, phagocytosis, and cytotoxic attack. The ability to mediate cytotoxic and phagocytic effector functions is a potential mechanism by which antibodies destroy targeted cells. Recognition of and lysis of bound antibody on target cells by cytotoxic cells that express FcγRs is referred to as antibody dependent cell-mediated cytotoxicity (ADCC). Other Fc receptors for various antibody isotypes include FcεRs (IgE), FcαRs (IgA), and FcμRs (IgM).

[0664] Thus, a modified Fc domain can have altered affinity, including but not limited to, increased or low or no affinity for the Fc receptor. For example, the different IgG subclasses have different affinities for the FcγRs, with IgG1 and IgG3 typically binding substantially better to the receptors than IgG2 and IgG4. In addition, different FcγRs mediate different effector functions. FcγR1, FcγRIIa/c, and FcγRIIIa are positive regulators of immune complex triggered activation, characterized by having an intracellular domain that has an immunoreceptor tyrosine-based activation motif (ITAM). FcγRIIb, however, has an immunoreceptor tyrosine-based inhibition motif (ITIM) and is therefore inhibitory. Thus, altering the affinity of an Fc region for a receptor can modulate the effector functions induced by the Fc domain.

[0665] In one example, an Fc region is used that is modified for optimized binding to certain FcγRs to better mediate effector functions, such as for example, ADCC. Such modified Fc regions can contain modifications corresponding to any one or more of G20S5, G20A, S23D, S23E, S23N, S23Q, S23T, K30H, K30Y, D33Y, R39Y, E42Y, T44H, V48I, S51E, H52D, E56Y, E561, E56H, K58E, G65D, E67L, E67H, S82A, S82D, S88T, S108G, S108I, K110T, K110E, K110D, A111D, A114Y, A114L, A114I, I116D, I116E, I116N, I116Q, E117Y, E117A, K118T, K118F, K118A, and P180L of the exemplary Fc sequence set forth in SEQ ID NO:167, or combinations thereof. A modified Fc containing these mutations can have enhanced binding to an FcR such as, for example, the activating receptor FcγIIIa and/or can have reduced binding to the inhibitory receptor FcγRIIb (see e.g., US 2006/0024298). Fc regions modified to have increased binding to FcRs can be more effective in facilitating the destruction of cancer cells in patients, even when linked with an ECD polypeptide. There are a number of possible mechanisms by which antibodies destroy tumor cells, including anti-proliferation via blockage of need growth pathways, intracellular signaling leading to apoptosis, enhanced down-regulation and/or turnover of receptors, ADCC, and via promotion of the adaptive immune response.

[0666] In another example, a variety of Fc mutants with substitutions to reduce or ablate binding with FcγRs also are known. Such muteins are useful in instances where there is a need for reduced or eliminated effector function mediated by Fc. This is often the case where antagonism, but not killing of the cells bearing a target antigen is desired. Exemplary of such an Fc is an Fc mutein described in U.S. Pat. No. 5,457,035 and set forth in SEQ ID NO:169. The amino acid sequence of this mutein is identical to the Fc sequence presented in SEQ ID NO:168, except that amino acid 19 has been changed from Leu to Ala, amino acid 20 has been changed from Leu to Glu, and amino acid 22 has been changed from Gly to Ala. Similar mutations can be made in any Fc sequence such as, for example, the exemplary Fc sequence set forth in SEQ ID NO:167. This mutein exhibits reduced affinity for Fc receptors.

[0667] In some instances, an ECD polypeptide Fc chimeric protein provided herein can be modified to enhance binding to the complement protein C1q. In addition to interacting with FcRs, Fc domains also interact with the complement protein C1q to mediate complement dependent cytotoxicity (CDC). C1q forms a complex with the serine proteases C1r and C1s to form the C1 complex. C1q is capable of binding six antibodies, although binding to two IgGs is sufficient to activate the complement cascade. Similar to Fc interaction with FcRs, different IgG subclasses have different affinity for C1q, with IgG1 and IgG3 typically binding substantially better than IgG2 and IgG4. Thus, a modified Fc having increased binding to C1q mediates enhanced CDC, which is a possible mechanism by which antibodies promote tumor cell destruction. Exemplary modifications in an Fc region that increase binding to C1q include, but are not limited to, amino acid modifications corresponding to K110W, K110Y, and E117S in SEQ ID NO:167.

[0668] In an additional example, an Fc region can be utilized that is modified in its binding to FcRn, thereby improving the pharmacokinetics of an ECD-Fc chimeric polypeptide. FcRn is the neonatal FcR, the binding of which recycles endocytosed antibody from the endosomes back to the bloodstream. This process, coupled with preclusion of kidney filtration due to the large size of the full-length molecule, results in favorable antibody serum half-lives ranging from one to three weeks. Binding of Fe to FcRn also plays a role in antibody transport. Exemplary modifications in an Fc protein for enhanced binding to FcRn include modifications of amino acids corresponding to T34Q, T34E, M212L, and M212F in SEQ ID NO:267.

[0669] Typically, a polypeptide multimer is a dimer of two chimeric proteins created by linking, directly or indirectly, two of the same or different ECD polypeptides to an Fc polypeptide. In some examples, a gene fusion encoding the ECD-Fc chimeric protein is inserted into an appropriate expression vector. The resulting ECD-Fc chimeric proteins can be expressed in host cells transformed with the recombinant expression vector, and allowed to assemble much like antibody molecules, where interchain disulfide bonds form between the Fc moieties to yield divalent ECD polypeptides. Typically, a host cell and expression system is a mammalian expression system to allow for glycosylation of the amino acid corresponding to N81 in SEQ ID NO:167. Glycosylation at this position is important for stabilizing the Fc proteins. Other host cells also can be used where glycosylation at this position is not a consideration.

[0670] The resulting chimeric polypeptides containing Fc moieties, and multimers formed therefrom, can be easily purified by affinity chromatography over Protein A or Protein G columns. Where two nucleic acids encoding different ECD chimeric polypeptides are transformed into cells, the formation of heterodimers must be biochemically achieved since ECD chimeric molecules carrying the Fc-domain will be expressed as disulfide-linked homodimers as well. Thus, homodimers can be reduced under conditions that favor the disruption of inter-chain disulfides, but do no effect intra-chain disulfides. Typically, chimeric monomers with different extracellular portions are mixed in equimolar amounts and oxidized to form a mixture of homo- and heterodimers. The components of this mixture are separated by chromatographic techniques. Alternatively, the formation of this type of heterodimer can be biased by genetically engineering and expressing ECD fusion molecules that contain an ECD polypeptide, followed by the Fc-domain of hIgG, followed by either c-jun or the c-fos leucine zippers (see below). Since the leucine zippers form predominantly heterodimers, they can be used to drive the formation of the heterodimers when desired. ECD chimeric polypeptides containing Fc regions also can be engineered to include a tag with metal chelates or other epitope. The tagged domain can be used for rapid purification by metal-chelate chromatography, and/or by antibodies, to allow for detection of western blots, immunoprecipitation, or activity depletion/blocking in bioassays.

ii. Leucine Zipper

[0671] Another method of preparing ECD polypeptide multimers involves use of a leucine zipper domain. Leucine zippers are peptides that promote multimerization of the proteins in which they are found. Typically, leucine zipper is a term used to refer to a repetitive heptad motif containing four to five leucine residues present as a conserved domain in several proteins. Leucine zippers fold as short, parallel coiled coils, and are believed to be responsible for oligomerization of the proteins of which they form a domain. Leucine zippers were originally identified in several DNA-binding proteins (see e.g., Landschulz et al. (1988) Science 240:1759), and have since been found in a variety of proteins. Among the known leucine zippers are naturally occurring peptides and derivatives thereof that dimerize or trimerize. Recombinant chimeric proteins containing an ECD polypeptide linked, directly or indirectly, to a leucine zipper peptide can be expressed in suitable host cells, and the ECD polypeptide multimer that forms can be recovered from the culture supernatant.

[0672] Leucine zipper domains fold as short, parallel coiled coils (O'Shea et al. (1991) Science, 254:539). The dimer formed by a leucine zipper domain is stabilized by the heptad repeat, designated (abcdefg)ₙ (see e.g., McLachlan and Stewart (1978) J. Mol. Biol. 98:293), in which residues a and d are generally hydrophobic residues, with d being a leucine, which lines up on the same face of a helix. Oppositely-charged residues commonly occur at positions g and e. Thus, in a parallel coiled coil formed from two helical leucine zipper domains, the hydrophobic side chains of the first helix are packed in between the side chains of the second helix.

[0673] The leucine residues at position d contribute large hydrophobic stabilization energies, and are important for dimer formation (Krystek et al. (1991) Int. J Peptide Res. 38:229). Hydrophobic stabilization energy provides the main driving force for the formation of coiled coils from helical monomers. Electrostatic interactions also contribute to the stoichiometry and geometry of coiled coils.

### (a) Fos and Jun

[0674] Two nuclear transforming proteins, fos and jun, exhibit leucine zipper domains, as does the gene product of the murine proto-oncogene, c-myc. The leucine zipper domain is necessary for biological activity (DNA binding) in these proteins. The products of the nuclear oncogenes fos and jun contain leucine zipper domains that preferentially form a heterodimer (O'Shea et al. (1989) Science, 245:646; Turner and Tijian (1989) Science, 243:1689). For example, the leucine zipper domains of the human transcription factors c-jun and c-fos have been shown to form stable heterodimers with a 1:1 stoichiometry (see e.g., Busch and Sassone-Corsi (1990) Trends Genetics, 6:36-40; Gentz et al., (1989) Science, 243:1695-1699). Although jun-jun homodimers also have been shown to form, they are about 1000-fold less stable than jun-fos heterodimers.

[0675] Thus, an ECD polypeptide multimer provided herein can be generated using a jun-fos combination. Generally, the leucine zipper domain of either c-jun or c-fos is fused in frame at the C-terminus of an ECD of a polypeptide by genetically engineering fusion genes. Exemplary amino acid sequences of c-jun and c-fos leucine zippers are set forth in SEQ ID NOs:170 and 171, respectively. In some instances, a sequence of a leucine zipper can be modified, such as by the addition of a cysteine residue to allow formation of disulfide bonds, or the addition of a tyrosine residue at the C-terminus to facilitate measurement of peptide concentration. Such exemplary sequences of encoded amino acids of a modified c-jun and c-fos leucine zipper are set forth in SEQ ID NOs: 172 and 173, respectively. In addition, the linkage of an ECD polypeptide with a leucine zipper can be direct or can employ a flexible linker domain, such as for example a hinge region of IgG, or other polypeptide linkers of small amino acids such as glycine, serine, threonine, or alanine at various lengths and combinations. In some instances, separation of a leucine zipper from the C-terminus of an encoded polypeptide can be effected by fusion with a sequence encoding a protease cleavage site, such as for example, a thrombin cleavage site. Additionally, the chimeric proteins can be tagged, such as for example, by a 6×His tag, to allow rapid purification by metal chelate chromatography and/or by epitopes to which antibodies are available, such as for example a myc tag, to allow for detection on western blots, immunoprecipitation, or activity depletion/blocking bioassays.

### (b) GCN4

[0676] A leucine zipper domain also is found in a nuclear protein that functions as a transcriptional activator of a family of genes involved in the General Control of Nitrogen (GCN4) metabolism in S. cerevisiae. The protein is able to dimerize and bind promoter sequences containing the recognition sequence for GCN4, thereby activating transcription in times of nitrogen deprivation. An exemplary sequence of a GCN4 leucine zipper capable of forming a dimeric complex is set forth in SEQ ID NO: 180.

[0677] Amino acid substitutions in the a and d residues of a synthetic peptide representing the GCN4 leucine zipper domain (i.e., amino acid substitutions in the sequence set forth as SEQ ID NO:180), have been found to change the oligomerization properties of the leucine zipper domain. For example, when all residues at position a are changed to isoleucine, the leucine zipper still forms a parallel dimer. When, in addition to this change, all leucine residues at position d also are changed to isoleucine, the resultant peptide spontaneously forms a trimeric parallel coiled coil in solution. An exemplary sequence of such a GNC4 leucine zipper domain capable of forming a trimer is set forth in SEQ ID NO:181. Substituting all amino acids at position d with isoleucine and at position a with leucine results in a peptide that tetramerizes. Such an exemplary sequence of a leucine zipper domain of GCN4 capable of forming tetramers is set forth in SEQ ID NO:182. Peptides containing these substitutions are still referred to as leucine zipper domains since the mechanism of oligomer formation is believed to be the same as that for traditional leucine zipper domains such as the GCN4 described above and set forth in SEQ ID NO:180.

iii. Other Multimerization Domains

[0678] Other multimerization domains are known to those of skill in the art and are any that facilitate the protein-protein interaction of two or more polypeptides that are separately generated and expressed as ECD fusions. Examples of other multimerization domains that can be used to provide protein-protein interactions between two chimeric polypeptides include, but are not limited to, the barnase-barstar module (see e.g., Deyev et al., (2003) Nat. Biotechnol. 21:1486-1492); selection of particular protein domains (see e.g., Terskikh et al., (1997) PNAS 94: 1663-1668 and Muller et al., (1998) FEBS Lett. 422:259-264); selection of particular peptide motifs (see e.g., de Kruif et al., (1996) J. Biol. Chem. 271:7630-7634 and Muller et al., (1998) FEBS Lett. 432: 45-49); and the use of disulfide bridges for enhanced stability (de Kruif et al., (1996) J Biol. Chem. 271:7630-7634 and Schmiedl et al., (2000) Protein Eng. 13:725-734). Exemplary of another type of multimerization domain is one where multimerization is facilitated by protein-protein interactions between different subunit polypeptides, such as is described below for PKA/AKAP interaction.

### (a) R/PKA-AD/AKAP

[0679] Heteromultimeric ECD polypeptides also can be generated utilizing protein-protein interactions between the regulatory (R) subunit of cAMP-dependent protein kinase (PKA) and the anchoring domains (AD) of A kinase anchor proteins (AKAPs, see e.g., Rossi et al., (2006) PNAS 103:6841-6846). Two types of R subunits (RI and RII) are found in PKA, each with an α and β isoform. The R subunits exist as dimers, and for RII, the dimerization domain resides in the 44 amino-terminal residues (see e.g., SEQ ID NO: 183). AKAPs, via the interaction of their AD domain, interact with the R subunit of PKA to regulate its activity. AKAPs bind only to dimeric R subunits. For example, for human RIIa, the AD binds to a hydrophobic surface formed from the 23 amino-terminal residues. An exemplary sequence of AD is AD1 set forth in SEQ ID NO:184, which is a 17 amino acid residue sequence derived from AKAP-IS, a synthetic peptide optimized for RII-selective binding. Thus, a heteromultimeric ECD polypeptide can be generated by linking (directly or indirectly) a nucleic acid encoding an ECD polypeptide, such as a HER ECD polypeptide, with a nucleic acid encoding an R subunit sequence (i.e., SEQ ID NO:183). This results in a homodimeric molecule, due to the spontaneous formation of a dimer effected by the R subunit. In tandem, another ECD polypeptide fusion can be generated by linking a nucleic acid encoding another ECD polypeptide to a nucleic acid sequence encoding an AD sequence. Upon co-expression of the two components, such as following co-transfection of the ECD chimeric components in host cells, the dimeric R subunit provides a docking site for binding to the AD sequence, resulting in a heteromultimeric molecule. This binding event can be further stabilized by covalent linkages, such as for example, disulfide bonds. In some examples, a flexible linker residue can be fused between the nucleic acid encoding the ECD polypeptide and the multimerization domain. In another example, fusion of a nucleic acid encoding an ECD polypeptide can be to a nucleic acid encoding an R subunit containing a cysteine residue incorporated adjacent to the amino-terminal end of the R subunit to facilitate covalent linkage (see e.g., SEQ ID NO:185). Similarly, fusion of a nucleic acid encoding a partner ECD polypeptide can be to a nucleic acid encoding an AD subunit also containing incorporation of cysteine residues to both the amino- and carboxyl-terminal ends of AD (see e.g., SEQ ID NO:186).

### 3. Chimeric ECD Polypeptides

[0680] Chimeric ECD polypeptides are prepared as described herein for use in the formation of ECD multimers. Chimeric ECD polypeptides typically contain all or part of an ECD of a CSR linked directly or indirectly to a multimerization domain. Exemplary multimerization domains are any described herein including, but not limited to, an immunoglobulin sequence (i.e., a constant region (Fc)), a leucine zipper, compatible protein-protein interaction domains, a coiled-coil motif, a helix loop motif, a complementary hydrophobic regions, complementary hydrophilic regions, a protuberance-into-cavity, and a compensatory cavity of identical or similar size, and any others sufficient to form stable multimers. To allow for the formation of multimeric molecules, multimerization domains are the same or complementary between a first chimeric polypeptide and a second chimeric polypeptide. Monomers of separate chimeric ECD polypeptides, once expressed, are stably associated via the multimerization domain to form multimeric ECD polypeptides.

[0681] Any ECD portion of a CSR can be used as a multimer partner. For example, any of the ECDs described above, or those set forth in any of SEQ ID NOs:10, 12, 14, 16, 18, 20, 22, 24, 26, 28, 30, 32, 34, 127, 129, 131, 133, 135, 136, 137, 138, 139, 141, 143, 144, 146, 148, 149, 150, 151, 153, 155, 157, 159, 298, 200, or301-399 or any ECD portion of a CSR, including an ECD of a FGFR, a VEGFR, IGF1-R and splice variants thereof, such as ECD portions of any CSR described in Table 10 and set forth in any of SEQ ID NOs: 194, 196, 198, 200, 202, 204, 206, 208, 210, 212, 214, 216, 218, 220, 222, 224, 226, 228, 230, 232, 234, 236, 238, 240, 242, 244, 246, 248, 250, 252, 254, 256, 258, 260, or 262 can be used to generate chimeric ECD polypeptides, where all or part of the ECD polypeptide is linked to a multimerization domain. Typically, at least one, but sometimes both, of the ECD portions is all or a portion of a HER family receptor sufficient to bind ligands and/or dimerize (i.e., all or part of a HER1, HER2, HER3, or HER4 molecule) linked to a multimerization domain. Examples of ECD, or portions thereof, of HER family receptors for use as multimerization partners are described herein above and are set forth in any of SEQ ID NOs: 10, 12, 14, 16, 18, 20, 22, 24, 26, 28, 30, 32, 129, 131, 136, 137, and 159. In some examples, at least one of the multimer partners is all or part of the ECD of a HER1 receptor. For example, exemplary of multimeric HER ECD polypeptides is a multimer formed between the ECD, or portion thereof, of HER1/HER3 or HER1/HER4. Additionally, a chimeric ECD polypeptide for use in the formation of an ECD multimer can include hybrid ECD polypeptides linked to a multimerization domain.

[0682] In one example, ECD chimeric polypeptides include linkage, directly or indirectly, of an ECD polypeptide with a sequence from an immunoglobulin molecule. In one example, the multimerizing component is an immunoglobulin-derived domain from human IgG, IgM, IgD, IgM, or IgA, or comparable immunoglobulin domains from other animals including, but not limited to mice. In other examples, the multimerizing component is selected from any of the Fc domain of IgG, the heavy chain of IgG, and the light chain of IgG. Typically, the Fc domain of IgG is used, and can be selected from an IgG isotype including IgG1, IgG2, IgG3, and IgG4, as well as any allotype within each isotype group. In most instances, the Fc domain is of IgG1, or a derivative thereof which can be modified for specifically desired properties as described herein. The Fc portion most often contains at least part of the hinge region, and the CH2 and CH3 domains of an immunoglobulin heavy chain. An exemplary Fc sequence for use as a multimerizing component is set forth in SEQ ID NO:167, but others are known, for example, depending upon the length of the hinge portion used in the Fc sequence. Typically, fusion of an ECD polypeptide is by direct linkage with the Fc sequence, but also can be by indirect linkage such as through peptide linkers or chemical linkers including heterobifunctional crosslinking agents. Generally, the N-terminal ECD, or portion thereof, of a CSR including any HER family receptor, is fused at the C-terminus to the Fc portion of human IgG1, and a linker peptide and/or an epitope tag if necessary.

### Exemplary Chimeric HER ECD Polypeptides

[0683] Chimeric polypeptides included for use in the formation of ECD multimers provided herein include any containing a full-length ECD, or truncated portions thereof, of HER1 and an Fc multimerizing component, and optionally an epitope tag such as a c-myc or His tag for the purification and/or detection of the HER1 ECD chimeric polypeptide. Exemplary HER1-Fc chimeric polypeptides are set forth in SEQ ID NOs: 38 and 40, and encoded by a sequence of nucleotides set forth in SEQ ID NOs: 37 and 39, respectively. For example, the exemplary HER1-Fc chimeric polypeptide set forth as SEQ ID NO:38 (HF110-Fc; HER1-501/Fc; HFD110) contains the truncated ECD sequence of HER1 set forth in SEQ ID NO:10 (corresponding to amino acids 1-501 of SEQ ID NO:38), operatively linked at the N-terminus to a sequence containing a XhoI restriction linker (corresponding to amino acids 502-503), a peptide linker sequence (corresponding to amino acids 504-508), and a sequence for an Fc multimerizing component (corresponding to amino acids 509-739). In another example, the exemplary HER1-Fc chimeric polypeptide set forth as SEQ ID NO:40 (HF100-Fc; HER1-621/Fc; H1FD100) contains a full-length ECD sequence of HER1 set forth in SEQ ID NO:12 (corresponding to amino acids 1-621 of SEQ ID NO:40), a peptide linker sequence (corresponding to amino acids 622-626), and a sequence for an Fc multimerizing component (corresponding to amino acids 627-857. In addition, HER1-Fc molecules, including for example the exemplary HF110-Fc and HF100-Fc molecules, can optionally contain an epitope tag. For example, the exemplary HF110-Fc molecule set forth in SEQ ID NO:38 also can optionally include a myc epitope tag set (corresponding to amino acids 740-749 of SEQ ID NO:38). In another example, the HF100-Fc molecule set forth in SEQ ID NO:40, also can optionally include a His epitope tag or other tag (i.e., HFD100T). An exemplary HFD100T molecule is set forth in SEQ ID NO:406 an contains a full-length ECD sequence of HER1 (corresponding to amino acids 1-621 of SEQ ID NO:406), operatively linked at the N-terminus to a sequence containing an XbaI linker (corresponding to amino acids 622-623), a peptide linker sequence (corresponding to amino acids 624-627), a sequence for an Fc multimerizing component (corresponding to amino acids 628-858), a sequence containing an AgeI linker (corresponding to amino acids 859-860), and a sequence for a 6×His tag (corresponding to amino acids 861-866 of SEQ ID NO:406).

[0684] Chimeric polypeptides included for use in the formation of ECD multimers provided herein include any containing a full-length ECD, or truncated portions thereof, of HER2 and an Fc multimerizing component, and optionally an epitope tag such as a c-myc tag or His tag for the purification and/or detection of the HER2 ECD chimeric polypeptide. An exemplary HER2-Fc chimeric polypeptides is set forth in SEQ ID NO:42, and encoded by a sequence of nucleotides set forth in SEQ ID NO:41. The exemplary HER2-Fc chimeric polypeptide set forth as SEQ ID NO:40 (HF200-Fc; HER2-650/Fc; HFD200) contains the full-length ECD sequence of HER2 set forth in SEQ ID NO:18 (corresponding to amino acids 1-628 of SEQ ID NO:42), operatively linked at the N-terminus to a sequence containing a peptide linker sequence (corresponding to amino acids 629-633), and a sequence for an Fc multimerizing component (corresponding to amino acids 634-864). In addition, HER2-Fc molecules, including for example the exemplary HF200-Fc molecule, can optionally contain an epitope tag.

[0685] Chimeric polypeptides included for use in the formation of ECD multimers provided herein include any containing a full-length ECD, or truncated portions thereof, of HER3 and an Fc multimerizing component, and optionally an epitope tag such as a c-myc tag or His for the purification and/or detection of the HER3 ECD chimeric polypeptide. An exemplary HER3-Fc chimeric polypeptide is set forth in SEQ ID NOs: 44 and 46, and encoded by a sequence of nucleotides set forth in SEQ ID NOs: 43 and 45, respectively. For example, the exemplary HER3-Fc chimeric polypeptide set forth in SEQ ID NO:44 (HF310-Fc; HER3-500/Fc; HFD310) contains the truncated ECD sequence of HER3 set forth in SEQ ID NO:20 (corresponding to amino acids 1-500 of SEQ ID NO:44), operatively linked at the N-terminus to a sequence containing a peptide linker sequence (corresponding to amino acids 501-505), and a sequence for an Fc multimerizing component (corresponding to amino acids 506-736). In another example, the exemplary HER3-Fc chimeric polypeptide set forth in SEQ ID NO:46 (HF300-Fc; HER3-621/Fc; HFD300) contains the full-length ECD sequence of HER3 set forth in SEQ ID NO:26 (corresponding to amino acids 1-621 of SEQ ID NO:46), operatively linked at the N-terminus to a sequence containing a peptide linker sequence (corresponding to amino acids 622-626), and a sequence for an Fc multimerizing component (corresponding to amino acids 627-857). In addition, HER3-Fc molecules, including for example the exemplary HF310-Fc and HF300-Fc molecules, can optionally contain an epitope tag.

[0686] Chimeric polypeptides included for use in the formation of ECD multimers provided herein include any containing a full-length ECD, or truncated portions thereof, of HER4 and an Fc multimerizing component, and optionally an epitope tag such as a c-myc or His tag for the purification and/or detection of the HER4 ECD chimeric polypeptide. An exemplary HER4-Fc chimeric polypeptide is set forth in SEQ ID NO: 48, and encoded by a sequence of nucleotides set forth in SEQ ID NO:47. The exemplary HER4-Fc chimeric polypeptide set forth as SEQ ID NO:48 (HF400-Fc; HER4-650/Fc; HFD400) contains the full-length ECD sequence of HER4 set forth in SEQ ID NO:32 (corresponding to amino acids 1-625 of SEQ ID NO:48), operatively linked at the N-terminus to a sequence containing a peptide linker sequence (corresponding to amino acids 626-630), and a sequence for an Fc multimerizing component (corresponding to amino acids 631-861). In addition, HER4-Fc molecules, including for example the exemplary HF400-Fc molecule, can optionally contain an epitope tag.

### E. ECD MULTIMERS

[0687] ECD multimers provided herein contain at least two ECD polypeptides that are stably associated via interactions of their respective multimerization domains. The ECD multimers can be homo-multimers, but most often are heteromultimers where the ECD polypeptide components of the multimer are different. ECD heteromultimers are pan-receptor therapeutics, including pan-HER therapeutics. ECD multimers target several epitopes on HER family members. Thus, the resulting ECD multimeric molecule modulates, typically inhibits, the activity of two or more cognate or interacting CSRs. Modulation can be via interaction with one or more ligands and/or via dimerization with a full-length cognate receptor or other interacting CSR. Thus, the multimeric ECD polypeptide bind to one or more ligands, generally two or more ligands, of each of the respective ECD polypeptide and/or dimerize with a cognate receptor or interacting receptor on the cell surface. Thus, the resultant ECD polypeptide multimers are useful as antagonists of cognate CSRs. Such antagonists are useful in treating disease resulting from ligand binding and/or activation of the cognate receptor.

[0688] HER family receptors are most often in an inactive form, with only up to 5% of the HER molecules on the transmembrane in an active configuration. Normally, for full-length HER receptors, the mechanism governing the transition of inactive to active form is ligand binding. Ligand binding reorients the orientation of the receptor molecule forcing the dimerization arm to shift from a tethered conformation to a conformation that has the potential to dimerize with another HER molecule. Active forms of HER molecules can be mimicked by forcing dimerization of all or part of the extracellular domain of a HER molecule with a multimerization domain such as, but not limited to, an Fc fragment. Thus, the fusion of a HER ECD with a multimerization domain forces the HER molecule to adopt a ligand-independent activated conformation (i.e., untethered), similar to the constitutively activated HER2 molecule. For example, where the multimerization domain is an Fc molecule, expression of a chimeric polypeptide can be produced as a homodimer where dimerization is forced between two expressed monomeric polypeptides via interactions of the Fc domain. In some instances, such a homodimer can result in improved properties of the ECD polypeptide as compared to a monomeric form of the ECD. In one example, linkage of all or part of a HER ECD with a Fc multimerization domain can create a high affinity receptor complex capable of high ligand binding affinity where the monomeric form of the ECD is unable to bind ligand. For example, as described in Example 4, a monomeric ECD molecule containing the complete ECD of a mature HER1 receptor (i.e., amino acids 1-621) shows only minimal binding to EGF. When the ECD polypeptide is linked to an Fc multimerization domain the ability of the homodimeric HER1 ECD molecule to bind to EGF is greatly increased.

[0689] Use of this same mechanism for the stabilization of heteromultimers of CSR molecules can be used to produce pan-receptor ECD multimers, including pan-HER ECD multimers. Among the activities of a pan-receptor therapeutic is as a high affinity soluble receptor complex having affinity for more than one ligand. Thus, a pan-receptor multimer can be used as a ligand trap to sequester ligands, including growth factor ligands. The ligands that can be sequestered by the ECD multimer are those that are known to bind or interact with the polypeptide ECDs of the multimer. Where the components of the ECD multimer contain all or a part of one or more ECDs of a HER molecule sufficient to bind ligand, the ECD multimer potentially can sequester any one or more of the ligand combinations set forth in Table 9. For example, at least 10 different ligands can be targets if the multimer is a combination of HER1 and HER4. Alternatively, if the multimer is a combination of HER1 and HER3, any one or more ligands including EGF, amphiregulin, TGF-α, betacellulin, heparin-binding EGF, epiregulin, or neuregulin 1 or 2 (heregulin 1 or 2) can be sequestered by the multimeric molecule. Thus, in some cases where one of the ECD polypeptide components of the multimer is a HER molecule such as, for example, HER1, and the other is all of part of another CSR, the ECD multimer can interact with at least 7 ligands, six of which are ligands recognized by the ECD of HER1 and the remaining one or more ligands recognized by the partner ECD polypeptide. The additional ligand can be a growth factor or other ligand molecule involved in a disease process such as, but not limited to, a proliferative disease, angiogenic disease, or inflammatory disease. Exemplary of such ligands include VEGF, FGF, insulin, HGF, angiopoietin, and others. In an additional example, an ECD multimer that is created from a combination of one or more hybrid ECD polypeptides can be engineered such that it contains sufficient ligand binding portions for two, three, or up to four different CSRs and thus has the ability to sequester 2, 3, 4, 5, 6, 7, 8, 9, 10, 11, 12, 13, 14, 15, or more ligands from their respective full-length CSR.

[0690] Modulation of CSRs by ECD multimers provided herein also can be via direct interaction with a cognate or interacting transmembrane receptor. For example, activation of most all RTK receptors is via dimerization with a co-receptor to generate full-length homo- and heterodimeric receptors to allow for autophosphorylation of the catalytic tail for effector recruitment and downstream signaling. For example, HER receptors dimerize in various combinations as one mechanism to amplify and diversify HER signaling. All combinations of full-length HER receptors have been observed, with HER2 as the most typical dimerization partner. Thus, any interference with the ability of CSRs, particularly RTKS including HERs, to dimerize would impair receptor-mediated signaling. Exemplary of molecules that can impair CSR dimerization are ECD multimers, particularly HER ECD multimers. The activated, high affinity, form of HER ECD multimers that result from fusion with a multimerization domain, for example fusion with an Fc protein, predicts a “back-to-back” conformation that, whether or not bound by ligand, presents the dimerization arm in domain II in a configuration for interaction with transmembrane receptors. Such an interaction could interfere with the ability of a full-length HER receptor to partner with another full-length HER receptor at the transmembrane, thereby inhibiting activation of the receptor. Similar interactions and inhibition are contemplated for other CSR ECDs, including other RTK ECD multimers, that interfere with dimerization of cognate receptors. Thus, in addition or instead of sequestering ligands, a pan-receptor multimer provided herein can dimerize with one or more receptors to inhibit their activity. As described below, activity of a transmembrane receptor can be assessed by assays including, but not limited to, phosphorylation or cell proliferation.

[0691] Typically, ECD multimers are dimers, but also can be trimers or higher order multimers depending, for example, on the multimerization domain chosen for multimer formation. For example, an Fc domain will result in a dimeric molecule. In addition, generally a multimerization domain that is a leucine zipper also will result in a dimeric ECD molecule, however, variant forms of leucine zipper such as, for example, a variant GCN4 can be used to create a trimeric or higher ordered multimer.

[0692] Where higher ordered multimerization domains are desired, multimerization domains can be chosen accordingly. Those of skill in the art are familiar with the structural organizations of exemplary multimerization domain such as, for example, any provided herein.

### 1. Full-Length HER1 ECD and all or Part of an ECD of Another CSR

[0693] Provided herein is an ECD multimer that contains as a first polypeptide a full-length ECD of a HER1 linked to a multimerization domain, and as a second polypeptide all or part of an ECD of another CSR also linked to a multimerization domain. The multimerization domain of the first and second polypeptide can be the same or different, but where different the multimerization domains are complementary to allow for a stable protein-protein interaction between multimer components. Exemplary of a full-length HER1 ECD polypeptide is HF100, which includes amino acids 1-621 of a mature HER1 receptor such as set forth in SEQ ID NO:12, or allelic or species variants thereof. The ECD of a second polypeptide can be all or part of an ECD of any CSR, particularly any CSR involved in a disease process involving proliferation, angiogenesis, or inflammation, so long as the ECD polypeptide is not a full-length HER2 molecule. The ECD of a second polypeptide, however, can be part of the ECD of a HER2 molecule sufficient to dimerize with other HER molecules. Exemplary of truncated HER2 ECD polypeptides include the HF220 molecule set forth in SEQ ID NO:18 and the HF210 molecule set forth in SEQ ID NO: 16, and allelic variants thereof. In some instances, an ECD multimer containing the full-length HER1 molecule and the truncated HER2 molecule H1F210 is preferred, as the presence of modules 2-5 in subdomain IV of the truncated HER2 molecule influences the dimerization ability of the truncated HER2 molecule, such as is described in Example 5.

[0694] An ECD multimer containing as a first polypeptide a full-length HER1 ECD, can have as its second polypeptide component all or part of an ECD of a HER3 or HER4 receptor. Particular of such an ECD multimer is one that has the capability of binding two or more ligands from among an EGF, amphiregulin, TGF-α, betacellulin, heparin-binding EGF, or epiregulin, and one or more neuregulin. Such a polypeptide also can dimerize with any one or more of the HER receptors. For example, an ECD multimer that is combined with all or part of a HER4 ECD polypeptide has the capacity to bind any of neuregulins 1-4, including any isoforms thereof. Exemplary of such an ECD multimer is one where the first polypeptide of the multimer is a full-length HER1 ECD (i.e., HF100 set forth in SEQ ID NO:12, or allelic variants thereof) and the second polypeptide is a truncated HER4 polypeptide competent to bind ligand such as, but not limited to, the H1F410 molecule set forth in SEQ ID NO:28, or allelic variants of. The HER4 portion of the ECD multimer also can be a full-length HER4 molecule containing the complete ECD portion of a mature HER4 receptor such as is set forth in SEQ ID NO:32 (i.e., HF400). In some examples, multimerization of a HER1 ECD and all or part of a HER4 ECD is mediated via a multimerization domain. For example, the exemplary chimeric polypeptides set forth in SEQ ID NO:40 (HF100-Fc, or an epitope tagged version such as is set forth in SEQ ID NO:406) and set forth in SEQ ID NO:48 (HF400-Fc) can be co-expressed to produce a multimeric molecule.

[0695] Typically, a full length HER1 ECD polypeptide is combined in a multimer with all or part of a HER3 ECD polypeptide such that the resulting multimer has the capacity to bind any of neuregulin 1 or 2, including any isoforms thereof and/or dimerize with any one or more HER receptors on the cell surface. Exemplary of such an ECD multimer is one where the first polypeptide is a full-length HER1 ECD and the second polypeptide of the multimer is all or a portion of a HER3 polypeptide. HER1 and HER3 are two of the most commonly overexpressed receptors. Thus, an ECD multimer of HER1 and HER3 has the ability to trap ligands binding to two of the most commonly overexpressed receptors, while sparing some ligands that bind to HER4 (i.e., neuregulin 3 and neuregulin 4), which has not been shown to have a broad activity in cancer (Barnes et al. (2005) Clin Cancer Res 11:2163-8; Srinivasan et al. (1998) J Pathol. 185:236-45).

[0696] In one example, an ECD multimer of a HER1 ECD and a HER3 ECD can include as a first polypeptide a full-length of a HER1 ECD, and as a second polypeptide a truncated HER3 ECD polypeptide, where each polypeptide is linked to a multimerization domain. As mentioned above, exemplary of a full-length HER1 molecule is the HF100 molecule (SEQ ID NO:12), or allelic variants thereof. Any truncated HER3 ECD polypeptide is contemplated so long as it retains its ability to bind any one or more of a neuregulin 1 or 2 isoforms and/or to dimerize. Exemplary of such truncated HER3 ECD polypeptides include HF310 set forth in SEQ ID NO:20, p85HER3 set forth in SEQ ID NO:22, or ErbB3-519 set forth in SEQ ID NO:24, or allelic variants thereof. For example, the exemplary chimeric polypeptides set forth in SEQ ID NO:40 (HF100-Fc, or an epitope tagged version thereof such as is set forth in SEQ ID NO:406) and set forth in SEQ ID NO:44 (HF310-Fc) can be co-expressed to produce a multimeric molecule.

[0697] In another example, an ECD multimer of a HER1 ECD and a HER3 ECD can include as a first polypeptide a full-length of a HER1 ECD, such as the HF100 molecule (SEQ ID NO:12), and as a second polypeptide a full-length HER3 ECD molecule, where each polypeptide is linked to a multimerization domain. An exemplary full-length HER3 ECD molecule includes amino acids 1-621 of a mature HER3 full-length receptor, such as set forth in SEQ ID NO:26 (HF300). A full-length ECD multimer of HER1/HER3 can be linked by interactions of their respective multimerization domains. The multimerization domain of the first full-length HER1 ECD polypeptide and second HER3 ECD polypeptide can be the same or different, but where different the multimerization domains are complementary to allow for a stable protein-protein interaction between multimer components. In one example, each of the first and second polypeptides are linked to an Fc fragment such as, but not limited to, an IgG1 Fc fragment. Exemplary of full-length HER1 and HER3 ECD chimeric polypeptides linked to an Fc fragment are set forth in SEQ ID NO:40 or SEQ ID NO:46, respectively. Thus, a HER1/HER3 ECD multimer can be formed upon co-expression of a nucleic acid sequence encoded a polypeptide having an amino acid sequence set forth in SEQ ID NO:40 (or an epitope tagged version thereof such as set forth in SEQ ID NO:406) and SEQ ID NO:46 (or an epitope tagged version thereof such as set forth in SEQ ID NO:407), or allelic variants thereof. In addition, if necessary, either or both of the sequences of the chimeric polypeptides set forth in SEQ ID NO:40 or SEQ ID NO:46 can contain the addition of an epitope tag such as a c-myc of His tag, which then can be incorporated into the resulting HER1/HER3 ECD multimer. For example, a multimer can be generated where one or both chimeric polypeptides has a sequence of amino acids set forth in SEQ ID NO:406 and/or SEQ ID NO:407.

[0698] Additionally, the second polypeptide that can be combined with a full-length HER1 ECD to form an ECD multimer can be a CSR ECD polypeptide of any length so long as the second ECD polypeptide retains its ability to bind to ligand and/or dimerize. Exemplary ECD polypeptides that can be combined in a multimer with a full-length HER1 ECD polypeptide include but are not limited to all of part of VEGFR1 or 2, FGFR1-4, IGF1-R, Tie-1, Tie-2, MET, PDGFRA or B, PDGFRB, Epha1-8, TNFR, RAGE, or any other CSR involved in a disease process characterized by proliferative, angiogenic, or inflammatory components. Exemplary sequences of full-length ECD polypeptides of exemplary CSRs are set forth in Table 8. Portions thereof sufficient to bind ligand are known in the art as described herein for some exemplified RTKs. If not known, the subdomains required for ligand binding can be empirically determined based on alignments with related receptors and/or by using recombinant DNA techniques in concert with ligand binding assays. Other CSRs, and ECD portions thereof, contemplated for use in a multimer with a full-length HER1 ECD polypeptide can be empirically determined based on the disease to be treated, and/or on the contribution of a CSR to resistance to drugs targeted to a single cell surface receptor. In addition, alternatively spliced isoforms of any CSR can be used in multimers with a full-length HER1 ECD polypeptide. Exemplary of these are isoforms of IGF-1R such as are described in Example 11, and set forth as SEQ ID NOs: 298-300. Other CSR isoforms that can be used in ECD multimers are set forth in any of SEQ ID NOs: 301-384.

### 2. Two or More Truncated ECD Components

[0699] Also provided herein is an ECD multimeric molecule formed between two or more truncated ECD portions of any CSR ECD, where at least one of the CSRs is a shortened HER molecule. Typically, at least one of the truncated ECD portion is sufficient to bind ligand and/or dimerize with a CSR, typically both, unless the truncated ECD polypeptide is derived from HER2 in which case the polypeptide portion must at least be competent to dimerize with another cell surface receptor. Such a molecule can act as a pan-receptor therapeutic by modulating, typically inhibiting, one or more of a HER receptor and/or another CSR. Modulation can be by sequestering ligand and/or by dimerizing with the CSR. In some examples, each of the first and second polypeptide components can be linked directly or indirectly via a multimerization domain. The multimerization domain of the first and second polypeptide can be the same or different, but where different the multimerization domains are complementary to allow for a stable protein-protein interaction between multimer components. The ECD multimer can be formed between two shortened HER polypeptides, typically truncated ECD polypeptides of different HER receptors that retain their ligand binding ability and/or dimerize. One of skill in the art can determine the portions of HER molecules to use in creating the ECD multimer, such that at least one, typically both, of the shortened HER polypeptides retain their ability to bind ligand and/or to dimerize. For example, generally a truncated HER1, 2, or 3 molecule contains a sufficient portion of subdomains I and III to bind ligand, a sufficient portion of subdomain II to dimerize, and at least module I of subdomain IV. A truncated HER2 molecule generally contains at least a sufficient portion of subdomains I, II, and III, and at least modules 2-5 of subdomain IV to dimerize.

[0700] Any combination of a truncated HER ECD is contemplated for use in a hybrid ECD multimer. For example, a truncated HER1 ECD polypeptide can be combined with a truncated HER2, HER3, or HER4 polypeptide; a truncated HER2 ECD polypeptide can be combined with a truncated HER3 or HER4 ECD polypeptide; and a truncated HER3 polypeptide can be combined with a truncated HER4 ECD polypeptide. Exemplary of truncated HER polypeptides include any described herein such as, for example, any set forth in SEQ ID NOs: 10, 14, 16, 20, 24, 28, 30, 34, alternative splice variants of a HER receptor, for example any set forth in SEQ ID NOs: 22, 127, 129, 131, 133, 135, 136, 137, 138, 139, 141, 143, 144, 146, 148, 149, 150, 151, 153, 155, 157, or 159, or any allelic or species variants thereof. In one example a herstatin molecule or variant thereof (such as set forth in any of SEQ ID NOs:135, or 385-399) can be combined with any other truncated ECD HER polypeptide. In one example, an ECD multimer can include as a first polypeptide part of a HER1 ECD, and as a second polypeptide part of a HER3 ECD polypeptide, where each polypeptide is linked to a multimerization domain. Exemplary of a truncated HER1 molecule is H110 (SEQ ID NO:10), or allelic variants thereof. Exemplary of a truncated HER3 molecule is H1F310 (SEQ ID NO:20), p85-HER3 (SEQ ID NO:22), or ErbB3-519 (SEQ ID NO:24, or allelic variants thereof. For example, the exemplary chimeric polypeptide set forth in SEQ ID NO:38 (HER1-501/Fc; HFD110, with or without a c-myc tag) and the chimeric polypeptide set forth in SEQ ID NO:44 (HER3-500/Fc; HFD310) can be coexpressed to produce a multimeric molecule that is a truncated HER1/HER3 ECD heteromultimer.

[0701] In other examples, an ECD multimer provided herein can contain as a first polypeptide a truncated HER ECD polypeptide and as a second polypeptide another truncated CSR ECD polypeptide that is not of the HER family of receptors. As above, the truncated HER ECD polypeptide can be a portion of an ECD of a HER1, HER2, HER3, or HER4 receptor so long as at least one of the polypeptide components of the multimer, typically both, binds to ligand and/or dimerizes with a transmembrane receptor. Exemplary truncated HER family receptors include, but are not limited to, any set forth in any of SEQ ID NOs: 10, 14, 16, 20, 22, 24, 26, 28, 30, 34, 127, 129, 131, 133, 135, 136, 137, 138, 139, 141, 143, 144, 146, 148, 149, 150, 151, 153, 155, 157, 159, or 385-399, or any allelic or species variants thereof. A chimeric ECD polypeptide can include all or part of a ECD polypeptide of another cell surface receptor linked to a multimerization domain. Any truncated ECD CSR combination is contemplated herein to form an ECD multimer with a shortened HER ECD polypeptide, and can be empirically determined based on the disease to be treated, the contribution of a respective CSR to that disease, the known ligands for the CSR, the contribution of a CSR to resistance to drugs targeted to a single cell surface receptor, and other factors. Exemplary of CSRs are described herein above and include, but are not limited to, IGF-R1, VEGFR (i.e., VEGFR1 or VEGFR2), FGFR (i.e., FGFR1, FGFR2, FGFR3, or FGFR4), TNFR, PDGFRA or PDGFRB, MET, Tie (Tie-1 or Tie-2), an Eph receptor, or a RAGE. Exemplary sequences of full-length ECD polypeptides of exemplary CSRs are set forth in Table 10. Portions thereof sufficient to bind ligand are known in the art such as is described herein for some exemplified RTKs. If not known, the subdomains required for ligand binding can be empirically determined based on alignments with related receptors and/or by using recombinant DNA techniques in concert with ligand binding assays. In addition, alternatively spliced isoforms of any CSR can be used in multimers. Exemplary of these are isoforms of IGF-1R such as are described in Example 11, and set forth as SEQ ID NOs: 298-300. Other CSR isoforms that can be used in ECD multimers are set forth in any of SEQ ID NOs: 301-384.

### 3. Hybrid ECD Multimers

[0702] Provided herein are ECD multimers where at least one or both of the chimeric ECD polypeptides of the multimer is a hybrid ECD molecule containing ligand binding domains and/or dimerization domains from part of the ECD portion of any two or more CSR linked to a multimerization domain. Such hybrid ECD molecules are described herein above. For example, one such hybrid ECD polypeptide contains subdomain II from HER2 and subdomains I and III, which can be from the same or different receptor, from HER1, 3 or 4. Other combinations of a hybrid ECD can be empirically determined based on the known subdomain activities of relevant CSRs. Typically, at least one of the subdomains of one of the ECD hybrids confers dimerization ability to the resulting ECD multimer. Two or more of the same or different hybrid ECD molecules can be linked together directly or indirectly. In one example, the hybrid ECD molecules can be linked via fusion of a first hybrid ECD polypeptide with a multimerization domain and fusion of a second hybrid ECD polypeptide with the same or complementary multimerization domain. Formation of a hybrid ECD multimer is accomplished following co-expression of the respective encoding nucleic acid for the first and second polypeptide.

[0703] Additionally, ECD multimers can be formed where only one of the polypeptides of the multimer is a hybrid ECD and the second polypeptide is all or part of any other CSR molecule, such as for example any full-length ECD polypeptide described above or any truncated ECD polypeptide described above. Typically, the other CSR ECD polypeptide is all or part of a HER family receptor, alternative spliced isoforms of HER family receptors, or allelic variants thereof. Other CSRs, other than HER family receptors, can be combined with a hybrid ECD and can be selected as appropriate depending on the disease to be treated and/or the association of the CSR to resistance to drugs targeted to a single cell surface receptor.

4. ECD Components that are the Same or Derived from the Same CSR

[0704] Also provided herein are homo- or hetero-multimers that modulate at least one, sometimes two or more CSRs, by sequestering ligand and/or by directly interacting with a cognate CSR or other interacting CSR. Such ECD multimers can be homomultimers, typically homodimers, of a first ECD polypeptide linked to a multimerization domain, and a second ECD polypeptide linked to a multimerization domain where the first and second polypeptide are the same. Alternatively, such ECD multimers can be heteromultimers, where each of the first and second ECD polypeptide are derived from the same cognate CSR, but are different. Typically, but not always, where the ECD components are the same or derived from the same receptor, the activity of only a single receptor will be targeted. For example, in some instances, an ECD multimer that has as a first polypeptide a full-length IGF1-R ECD (i.e., corresponding to amino acids 31-935 of SEQ ID NO:260) and as a second polypeptide the same polypeptide as the first, or a truncated or isoform thereof, is a candidate therapeutic for modulating the activity of at least a full-length IGF1-R. In another example, a homo- or hetero-multimer containing a herstatin and/or another HER2 ECD component is a candidate for modulating at least one, but typically two or more CSRs, such as by directly interacting with full-length HER1, HER3, or HER4 receptors on the cell surface.

F. Growth Factor Traps (Pan Growth Factor Trap) Constructs with Modifications in the Multimerization Domain and/or the ECD, and with Optional Linker

[0705] As discussed throughout the disclosure herein, the Pan HER therapeutic contain Fcs to produce the heterodimers. For example, U.S. Patent Publication No. 2010/0055093, and Jin et al. (2009) Mol. Med. 15:11-20, and the disclosure herein, describe bispecific “ligand” trap constructs that target EGF receptor family ligands, including one designated RB200, and another designated RB242. A perceived problem with those constructs was that, when prepared, they are heterogeneous, and contain species that are homodimers, and heterodimers, the latter of which was the intended therapeutic. As described and shown herein, however, this is not a problem, the mixture of species can be used or formulated for use as a therapeutic, a pharmaceutical composition. As shown herein, the mixture of species is more therapeutically effective than the heterodimer alone. The following discussion describes and provides modifications of the multimerization domain that can further improve the resulting therapeutics.

[0706] RB200 and RB242 are exemplary of the ligand traps (GFTs/Pan-Her Therapeutics) that can be provided as mixtures of homodimers and heterodimers in the pharmaceutical compositions and methods provided herein. These can be modified as described herein, such as by optimization or modification of the ECD, optional linker, and multimerization domains, as described herein or as known to those of skill in the art to improve properties, such as ligand binding and/or receptor dimerization. It is understood that RB200 and RB242 and derivatives thereof provided as heterodimer and homodimer mixtures are exemplary of bi-specific or multi-specific therapeutics, such as bi-specific constructs, that can be provided as mixtures. The particular ratios and amounts of heterodimer to homodimer depends upon the cells in which they are produced, the conditions of production, the particulars of the constructs, and any other such factors known to those of skill in the art.

[0707] RB200 targets HER1 (EGFR), HER2, and HER3 ligands, and some HER4 ligands. It was designed so that it does not trap HER4-specific ligands because HER4 has roles in neuronal development that are not shared by other members of the EGFR family. RB200 is composed of the extracellular domain (ECD) of HER1/ErbB1 (amino acids 1 to 621 of SEQ ID NO:415) and HER3/ErbB3 (amino acids 1 to 621 of SEQ ID NO:416), fused with the Fc domain of human immunoglobulin G1 (IgG1) (HER1-HER3/Fc), and acts as a chimeric bispecific ligand trap. The HER3/Fc component of RB200 and RB242 can contains a 6×Histidine tag on the COOH terminal (see, e.g., Jin et al. (2009) Mol. Med. 15:11-20). RB200 binds HER1/ErbB1 ligands (EGF, TGF-α, HB-EGF, AR, BTC, EPR and EPG) and HER3/ErbB3 ligands (NRG1-α and NRG1-β3) with high affinity. RB200 inhibits EGF-stimulated and NRG1-31-stimulated tyrosine phosphorylation of HER family proteins (HER1, HER2 and HER3), and has shown potency in a variety of cell proliferation assays. RB200 inhibits tumor growth in in vivo animal models. R3242, discussed below, contains ligand-binding optimized ECDs in each chain.

[0708] The epidermal growth factor (EGF) ligand/receptor family plays a role in a variety of diseases, disorders, and conditions, including rheumatoid arthritis (RA). The EGF family (ErbB and the human epidermal growth factor receptor (HER)) of cell-surface receptors belong to the receptor tyrosine kinase (RTK) superfamily and contain extracellular domains (ECDs) and an intracellular tyrosine kinase signaling domain. The EGF family has four members: EGF receptor (EGFR)/HER1/ErbB1, HER2/ErbB2, HER3/ErbB3, and HER4/ErbB4, which are activated by a large family of ligands, including EGF, transforming growth factor α (TGF-α), heparin-binding EGF-like growth factor (HB-EGF), amphiregulin (AR), β-cellulin (BTC), epiregulin (EPR), epigen (EPG) and neuregulin (NRG). Within the EGFRs there are four ECDs; domains I and III are ligand-binding domains, and domains II and IV mediate binding to each other and to other members of this receptor family. Ligand binding induces the formation of homo- or heterodimers between the receptors. For example, TGF-α and EGF bind to EGFR/HER1/ErbB1, whereas NRG4 binds to HER4/ErbB4. Depending on the dimer formed, transphosphorylation of intracellular regions occurs, leading to the activation of numerous downstream signaling pathways, which results in cell proliferation, survival, and differentiation (see e.g., Jin et al. (2009) Mol. Med. 15:11-20).

[0709] The epidermal growth factor receptor family is composed of four closely related receptor tyrosine kinases: EGFR (ErbB-1), HER2 (Erb-B2), HER3 (ErbB-3) and HER 4 (ErbB-4). In many cancer types, mutation, or amplification of one the family members is associated with worsened survival in cancer patients. In autoimmune disease, TNF signaling transactivates the EGFR signaling pathway by inducing the synthesis of epiregulin and heparin-binding EGF (HB-EGF) on macrophages, both growth factors that activate the EGFR.

[0710] In a complementary manner, the EGFR and HER2 are upregulated on synovial fibroblasts, thereby driving their proliferation. EGFR, HER2 (ErbB2), and EGF-like growth factors are overexpressed, for example, in RA synovial fibroblasts and macrophages. Thus, the TNF and the EGFR pathways cooperate in the progression of lupus and rheumatoid arthritis, and other autoimmune diseases. Among the constructs provided herein are constructs designated as “ligand traps.” The ligand trap constructs intercept most inflammatory growth factors of the EGFR family, thereby suppressing the growth of rapidly growing synovial fibroblasts in affected RA joints. These ligand traps can be for administration in combination therapy. This combination therapy, such as for rheumatoid arthritis, synergistically can combine to achieve disease regression.

[0711] The EGFR family of growth factors are overexpressed in hyperproliferative/inflammatory diseases such as RA, and also is overexpressed in ovarian and other cancers. Elevated levels of the EGFR family and/or its cognate are a common component of multiple types of cancer. When overexpressed (or sometimes mutated) these receptors are causally associated with shorter survival in many kinds of malignancies. Examples of targeted therapeutics that act via the EGFR family are (listed with generic name and exemplary trademark providing source) cetuximab (Erbitux®), panitumumab (Vectibix®), trastuzumab (Herceptin®), and pertuzumab (Perjeta®). Small molecule inhibitors also target the intracellular tyrosine kinase activity of the EGFR family. Examples of small molecules include lapatinib (trademark Tykerb®), Gefitinib (trademark Iressa®) or the related drug erlotinib, and neratinib (trademark Nerlynx®). These drugs target only one of the EGFR family members, with the result that other members of the family can upregulate and compensate tumor growth. Similarly, an antibody vs. a single growth factor (e.g., TGF-α, EGF, HB-EGF, and others) inhibits only that growth factor, and the tumor cell will compensate by upregulating other growth factors. The ligand trap constructs provided herein address this by blocking HER1, HER2 and HER3 together. This results in pan-inhibition of the EGFR family on cancer cells. Ovarian cancer is among the cancers that are for treatment.

[0712] The ligand trap constructs provided herein are improved and/or their properties altered, improving therapeutic effects, by modifying the multimerization domain, such as by increasing or improving Fc regions modified as described herein (see, e.g., Tables below).

### 1. Receptor Tyrosine Kinases (RTKs)

[0713] As discussed, Receptor tyrosine kinases (RTKs) are high-affinity cell surface receptors for many polypeptide growth factors, cytokines, and hormones. RTKs are involved in many signal transduction pathways, and play a role in a variety of cellular processes, including cell division, proliferation, differentiation, migration, and metabolism. RTKs can be activated by ligands that bind specifically to their cognate receptors. Such activation, in turn, activates events in a signal transduction pathway, such as by triggering autocrine or paracrine cellular signaling pathways, for example, activation of second messengers, which results in specific biological effects. Approximately 20 different classes of RTKs have been identified, which include, for example, the epidermal growth factor receptor (EGFR) family (class I, also known as the ErbB family); the insulin receptor family (class II); the platelet-derived growth factor receptor (PDGFR) family (class III); the vascular endothelial growth factor receptor (VEGFR) family (class IV); the fibroblast growth factor receptor (FGFR) family (class V); the hepatocyte growth factor receptor (HGFR) family (class VIII); and the Eph receptor family (Ephs, after erythropoietin-producing human hepatocellular receptors; class IX), among others.

[0714] RTKs are associated with regulating pathways involved in angiogenesis, including physiologic and tumor blood vessel formation, and are implicated in the regulation of cell proliferation, migration, and survival. RTKs have been implicated in a number of diseases, including autoimmune diseases and cancers, such as breast and colorectal cancers, gastric carcinomas, gliomas and mesodermal-derived tumors. Dysregulation of RTKs has been associated with several cancers. For example, breast cancer has been associated with amplified expression of p185-HER2. RTKs also have been associated with ocular diseases, including diabetic retinopathies and macular degeneration. Additionally, members of the epidermal growth factor receptor (EGFR) family, as well as EGF-like growth factors (ligands), have been shown to be overexpressed in synovial fibroblasts and macrophages in patients with rheumatoid arthritis (RA).

a. Human Epidermal Growth Factor Receptor (HER) Family

[0715] Among the RTKs associated with disease is the class I human EGFR (HER; also referred to as the ErbB) family of receptors, which includes HER1/EGFR (ErbB1), HER2 (ErbB2/Neu), HER3 (ErbB3) and HER4 (ErbB4). HER1, HER3 and HER4 collectively bind over 11 canonical ligands, including epidermal growth factor (EGF), transforming growth factor (TGF)-α, heparin-binding (HB)-EGF, amphiregulin, β-cellulin (BTC), epiregulin, epigen, and neuregulin (NRG)1-4. HER2 does not bind any of these ligands, but acts as a signal amplifier by heterodimerization with other HER family members, such as HER3 and HER4 (see, e.g., Jin et al. (2009) Mol. Med. 15(1-2):11-20). HER1, HER2 and HER4 are active as tyrosine kinases, whereas HER3 is inactive as a kinase (despite having a kinase domain), and signals via the phosphatidylinositol 3-kinase (PI3K) pathway.

[0716] All members of the HER family have an extracellular ligand-binding domain, a single transmembrane domain, and a cytoplasmic tyrosine-kinase-containing domain. The extracellular region of each HER family member contains four subdomains, L1, CR1, L2 and CR2, where “L” refers to a leucine-rich repeat domain and “CR” refers to a cysteine-rich region/domain (also known as a furin-like repeat domain); the four subdomains also are referred to as domains I-IV, respectively. Domains I and III are ligand-binding domains, and domains II and IV mediate binding to each other and to other members of the receptor family. Domain II contains sequences required for dimerization, known as the dimerization arm, and domain IV contains sequences which allow for domain I/IV tethering, with the exception of HER2, which does not undergo a tethered conformation. In the absence of ligands, EGFR, HER3 and HER4 subdomains II and IV form an intramolecular auto-inhibitory tether. Upon ligand binding, the subdomains undergo conformational changes, allowing subdomains I and III to form a high-affinity ligand-binding pocket. It has been shown that mutagenic disruption of the tether formed by subdomains II and IV, or C-terminal deletion of subdomain IV, increases ligand-binding affinity by up to 15-fold (see, e.g., Jin et al. (2009) Mol. Med. 15(1-2):11-20).

[0717] HER family members are expressed in various tissues of epithelial, mesenchymal, and neuronal origin. Under normal physiological conditions, activation of the HERs is controlled by the spatial and temporal expression of their ligands, which are members of the EGF family of growth factors. Ligand binding induces the formation of receptor homodimers and multiple combinations of heterodimers, leading to the activation of the intrinsic kinase domain, self-phosphorylation of specific tyrosine residues in the cytoplasmic tail, the recruitment and phosphorylation of several intracellular proteins, and coupling to multiple downstream signaling cascades. The activated signaling pathways include the Ras-Raf-mitogen-activated protein kinase mitogenic pathway, the phosphatidylinositol 3-kinase-AKT cell survival pathway, and the stress-activated protein kinase C and Jak/Stat pathways. The induced signaling pathways result in a variety of cellular responses, including, for example, cell migration, invasion, proliferation, survival, and differentiation (see, e.g., Sarup et al. (2008) Mol. Cancer Ther. 7(10):3223-3236).

b. Diseases Associated with the Human Epidermal Growth Factor Receptor (HER) Family and their Ligands

[0718] Dysregulation of members of the HER family, as well as their ligands, by overexpression or due to mutations, has been shown to play a role in cancer and other diseases. For example, HER1 and HER2 have been implicated in the development and pathology of many human cancers, and alterations in these receptors have been associated with more aggressive disease and with poor clinical outcome. TGF-α overexpression has been associated with prostate, pancreatic, lung, ovarian, and colon cancers, while NRG1 overexpression has been associated with mammary adenocarcinomas. HER1 overexpression has been associated with gliomas, and head and neck, breast, bladder, prostate, kidney and non-small cell lung cancers, and mutations in HER1 have been associated with gliomas, as well as lung, breast, and ovarian cancers. HER2 overexpression has been associated with breast, lung, pancreatic, colon, esophageal, endometrial, and cervical cancers; HER3 has been associated with breast, colon, gastric, prostate, and oral squamous cell cancers; and HER4 has been associated with breast and prostate cancers, as well as childhood medulloblastoma (see, e.g., Yarden et al. (2001) Nat. Rev. Mol. Cell Biol. 2:127-137).

[0719] The EGF family of ligands and receptors has been shown to play a role in the development of inflammatory arthritis. For example, the expression of HER2, and the presence of the EGFR ligands EGF, amphiregulin and TGF-α, have been detected in the RA synovium. Adenoviral delivery of the human EGFR family inhibitor Herstatin, which as discussed above, is an alternative splice variant of HER2; it has been shown to abrogate all clinical signs of collagen-induced arthritis (CIA) in mice. Herstatin disrupts dimerization, and acts as a natural inhibitor of native HER1, HER2 and HER3. A patient with long-standing RA, who had previously been treated with rituximab and adalimumab, experienced a significant reduction in joint pain following treatment with the anti-EGFR/IER1 antibody cetuximab for head and neck cancer. These results indicate that HER-targeted treatments can be therapeutically useful in the treatment of autoimmune and inflammatory conditions, such as rheumatoid arthritis (RA) (see, e.g., Gompels et al. (2011) Arthritis Research & Therapy 13:R161).

[0720] Macrophages are a source of TNF in the chronically inflamed RA joint tissue. Phenotypic analysis of macrophages from the synovial tissues of patients with RA revealed an abundance of HBEGF (heparin binding EGF-like growth factor+) inflammatory macrophages, that overexpress the proinflammatory genes NR43A (nuclear receptor sub-family 4 group A member 3), PLAUR (plasminogen activator, urokinase receptor), and CXCL2, and the growth factors HB-EGF and epiregulin (EGFR family ligands). HBEGF⁺ inflammatory macrophages also produced the proinflammatory cytokine IL-1 and promoted synovial fibroblast invasiveness in an epidermal growth factor receptor-dependent manner. It was shown that the majority of medications used to treat RA targeted HBEGF⁺ macrophages in an ex vivo synovial tissue assay, and an EGFR inhibitor effectively blocked the macrophage-induced fibroblast response in RA tissue in an ex vivo assay, indicating that blockade of EGFR responses can provide a non-immunosuppressive therapeutic approach for RA (see, e.g., Kuo et al. (2019) Sci. Transl. Med. 11(491)). Such an approach is advantageous over the use of traditional anti-TNF therapies, which are immunosuppressive and are often associated with the development of serious infections, such as tuberculosis.

[0721] HER family signaling also has been associated with coronary atherosclerosis, which involves the migration of vascular smooth muscle cells in the arterial intima. Activation of the thrombin receptor is required for smooth muscle cell migration and proliferation, and activation of this G-protein-coupled receptor relies on transactivation by HER1/EGFR in response to HB-EGF. EGFR expression also is associated with psoriasis; in normal skin, the expression of EGFR is limited to the basal layer, whereas in patients with psoriasis, EGFR, and its ligand amphiregulin are highly expressed throughout the entire epidermal layer (see, e.g., Yarden et al. (2001) Nat. Rev. Mol. Cell Biol. 2:127-137).

[0722] Other HER-mediated diseases and conditions include neurodegenerative diseases and conditions, such as multiple sclerosis, Parkinson's disease, schizophrenia, and Alzheimer's Disease. For example, several diseases and conditions are associated with, e.g., caused by, or aggravated by, exposure to one or more neuregulin (NRG) ligands, such as NRG1, including type I, II, and III, NRG2, NRG3, and/or NRG4. Examples of NRG-associated diseases include neurological or neuromuscular diseases, including schizophrenia and Alzheimer's disease (see, e.g., U.S. Publication No. 2010/0055093).

[0723] Due to their role in cancer and other proliferative diseases, rheumatoid arthritis, neurodegenerative diseases, and autoimmune diseases, HERs are targets for therapeutic intervention. Anti-HER therapeutics include antibodies targeted to the extracellular domain (or ectodomain), referred to herein as the ECD, and small molecule tyrosine kinase inhibitors. Therapeutics approved for the treatment of cancers driven by the HER family of proteins include monoclonal antibodies, such as trastuzumab (directed at HER2), pertuzumab (directed at HER2), panitumumab (directed at HER1/EGFR) and cetuximab (directed at HER1/EGFR), and small molecule tyrosine kinase inhibitors, such as the HER1 kinase inhibitors gefitinib and erlotinib, and the dual HER2 kinase and HER1 kinase inhibitor lapatinib. For example, trastuzumab is used for the treatment of HER2-overexpressing node-positive or node negative breast cancer; cetuximab is used for the treatment of metastatic colorectal cancer, as well as head and neck cancer; panitumumab is used for the treatment of metastatic colorectal cancer; lapatinib is used as a frontline therapy for triple-positive breast cancer and as an adjuvant therapy for patients who have progressed on trastuzumab; and erlotinib is used to treat non-small cell lung cancer and pancreatic cancer.

[0724] Anti-HER therapeutics exhibit limited efficacy and limited duration of response. Trastuzumab (sold, for example, as Herceptin®) is a humanized version of a murine monoclonal antibody, and targets the extracellular domain of HER2. The effectiveness of trastuzumab, however, requires high expression (at least 3- to 5-fold overexpression) of HER2, and, as a result, fewer than 25% of breast cancer patients qualify for treatment. Among this population, a large proportion fail to respond to treatment. In addition, small molecule tyrosine kinase inhibitors often lack specificity. With the exception of patients that highly express HER2 and are treated with trastuzumab in combination with chemotherapy, the efficacy observed with single-targeted anti-HER antibodies or small molecule tyrosine kinase inhibitors is in the range of 10-15%. Treatments, particularly those directed at only one HER family member, also suffer from intrinsic or acquired resistance, which is associated with the co-expression and ligand activation of other RTKs, particularly other HER family members. For example, drug resistance is often associated with the up-regulation of, or compensation by, other HER family members, such as HER3 and HER4, or increased expression of HER1 or HER3 ligands by tumor cells. The homodimerization and heterodimerization among members of the HER family of receptors also has implications for therapies directed against a single HER family receptor. Because of the limited effectiveness of the available therapies, alternative anti-HER therapies are required. Provided herein are alternative, more effective therapies for targeting the HER family of RTKs and their ligands.

c. Mutations to Increase Affinity for Ligands

[0725] The human EGF receptor (HER) family members cooperate in malignancy. Of these, HER2 does not bind growth factors and HER3 does not encode an active tyrosine kinase. This diversity creates difficultly in creating pan-specific therapeutic HER family inhibitors. Single amino acid changes in the EGFR and HER3 that create high affinity sequestration of the cognate ligands and can be used in the constructs herein as receptor decoys to downregulate aberrant HER family activity have been identified (see, Pei et al. (2009) Mol. Med. 15:11-20).

[0726] In silico modeling and high throughput mutagenesis were used to identify receptor mutants with very high ligand binding activity. A single mutation (T15S; EGFR subdomain I) enhances affinity for EGF (2-fold), TGF-α (26-fold), and heparin-binding (HB)-EGF (6-fold). This indicates that T15 is an important, negative regulatory amino acid for EGFR ligand binding. Another mutation (Y246A; HER 3 subdomain II) enhanced neuregulin (NRG)1-β binding 8-fold, by interfering with subdomain II-IV interactions. The HER3 subunit of an EGFR:HER3 heterodimer suppresses EGFR ligand binding. Optimization required reversing this suppression by mutation of the EGFR tether domain (G564A; subdomain IV). This mutation resulted in enhanced ligand binding (EGF, 10-fold; TGF-α, 34-fold; HB-EGF, 17-fold; NRG1-β, 31-fold). This increased ligand binding was reflected in improved inhibition of in vitro tumor cell proliferation and tumor suppression in a human non-small cell lung cancer xenograft model. Amino acid substitutions were identified in the EGFR and HER3 ECDs that enhance ligand affinity, these, as well as additional mutations and combinations thereof, have been introduced into the constructs provided herein and in the pharmaceutical compositions provided herein that contain the mixtures of heterodimers and homodimers that include mutations to increase ligand binding to result in pharmaceutical products that downregulate the HER family for treating cancer.

### 2. Pan-Growth Factor Inhibition

[0727] As described herein, resistance to single-targeted anti-HER therapies, such as trastuzumab cetuximab, gefitinib and erlotinib, often is associated with the co-expression and/or upregulation of other HER family members and/or the overexpression of their ligands. One strategy to reduce or overcome this resistance, and to improve the efficacy of HER-targeted therapies, is to inhibit multiple ligand-induced HER family members simultaneously. This can be achieved, for example, by a chimeric HER ligand-binding molecule that behaves like a receptor decoy and sequesters multiple HER family ligands, preventing ligand-dependent receptor activation and downregulating aberrant HER family activity. The following sections describe previous constructs that can be combined in the heterodimer/homodimer mixtures for use in a pharmaceutical. Additional constructs with further improvements including different mutations or combinations thereof, and strategies for increasing serum half-life, are exemplified in the Examples.

a. RB200 and RB242 Ligand Traps

[0728] The antagonist designated RB242, which is a chimeric bi-specific ligand trap that is an Fc-mediated heterodimer of the EGFR (HER1) and HER3 ligand-binding domains, targets all four members of the EGFR/HER family. The EGFR and HER3 ligand-binding domains are dimerized by fusion of each ligand-binding domain with the Fc domain of human IgG1. In RB200, the C-termini of the extracellular domains (ECDs) of EGFR (corresponding to residues 1-621 of the mature EGFR protein, set forth in SEQ ID NO:415), and of HER3 (corresponding to residues 1-621 of the mature HER3 protein, set forth in SEQ ID NO:416), each are fused to the N-terminus of the Fc fragment of human IgG1 (corresponding to residues P100-K330 of SEQ ID NO:421), with a Gly-Arg-Met-Asp (GRMD) linker added to the N-terminus of the Fc fragment. The HER3/Fc component of RB200 contains a 6×His tag on the COOH terminus for purification.

[0729] RB200 has been shown to bind EGFR and HER3 ligands (including EGF, TGF-α, HB-EGF, amphiregulin, beta-cellulin, epiregulin, and epigen, and NRG1-a, NRG1-β1 and NRG1-β3, respectively) with high affinity, inhibit ligand-induced tyrosine phosphorylation of HER family members (HER1, HER2 and HER3), inhibit the proliferation of a diverse range of tumor cells in vitro, and suppress the growth of tumor xenografts (epidermoid carcinoma and non-small cell lung cancer) in nude mouse models. RB200 also exhibited synergy with tyrosine kinase inhibitors directed toward EGFR/IER1 and HER2 kinases, such as AG-825, erlotinib, gefitinib, or lapatinib, in the inhibition of tumor cell proliferation in vitro. The inhibition of ligand-stimulated phosphorylation of HER1, HER2 and HER3 was more effective by RB200 compared with monoclonal antibodies that target HER1 (C225) or HER2 (trastuzumab and 2C4) (see, e.g., Sarup et al. (2008) Mol. Cancer Ther. 7(10):3223-3236; Gompels et al. (2011) Arthritis Research & Therapy 13:R161).

[0730] The ligand trap designated R3242, derived from RB200, is an affinity optimized Fc-mediated triple mutant EGFR:HER3 heterodimer, comprising the mutations T15S and G564S in the EGFR ECD subdomains I and IV, respectively, with reference to the sequence of the mature EGFR protein (SEQ ID NO:415), and Y246A in the HER3 ECD subdomain II, with reference to sequence of the mature HER3 protein (SEQ ID NO:416). A HER1 (EGFR) allelic variant also contains the replacement N516K, so RB242 and any chain comprising HER1 can have this replacement, can have modified Fc domains to alter other properties, such as modifications that enhance neonatal Fc receptor (FcRn) recycling, and/or effector functions as described and detailed in sections below.

[0731] To express the RB200 and RB242 heterodimeric chimeric fusion protein, vectors encoding the HER1/Fc and HER3/Fc constructs were co-transfected into HEK293T cells at a ratio of 1:3 (HER1/Fc:HER3/Fc). This results in the expression of HER1/Fc and HER3/Fc homodimers, in addition to the HER1/Fc:HER3/Fc heterodimer of interest. The expressed proteins were purified by a combination of Protein-A, Ni-Sepharose® resin and EGFR-affibody column chromatography methods. Analytic reverse-phase high performance liquid chromatography (HPLC) revealed that the RB242 heterodimer contained approximately 10% combined contamination with the two homodimers (see, e.g., Sarup et al. (2008) Mol. Cancer Ther. 7(10):3223-3236). Thus, improved methods are required to improve the yield and purity of the heterodimer.

b. RB200 and RB242 for the Treatment of Autoimmune Disease

[0732] As discussed elsewhere herein, these ligand traps and modified forms thereof as described herein or known to those of skill in the art are intended for treatment of cancers, in particular those involving EGFRs and related receptors, and other diseases, including those detailed above. These constructs, and the compositions containing the mixtures of homodimers and heterodimers as described herein can be used for treatment of these and other diseases, disorders, and conditions.

[0733] Rheumatoid arthritis (RA) is an example of a disease, disorder, and condition that compositions provided herein can treat. A significant proportion of RA patients do not respond, or stop responding, to treatment with anti-TNF therapies, such as anti-TNF antibodies, which are associated with an increased risk of serious infections, including tuberculosis. Thus, alternative treatments are required. The increased expression of EGF ligands and receptors (HERs) has been documented in the synovium and synovial fluids of patients with rheumatoid arthritis (RA), indicating that therapies targeting EGFRs can be used to treat RA and other autoimmune and inflammatory diseases and disorders.

[0734] The bi-specific EGFR ligand trap RB200 (and its derivative R3242) displays a dose-dependent reduction in disease severity in collagen-induced arthritis (CIA). Mice with CIA were treated intraperitoneally with RB200 (or RB242), at a dose of 0.1 mg/kg, 1 mg/kg, or 10 mg/kg, on the day of disease onset (day 1), and on days 4 and 7 of disease. Treatment with 1 mg/kg or 10 mg/kg RB200 inhibited the increase in clinical score and paw swelling in a dose-dependent manner. EGF has been shown to promote angiogenesis, and RB200-treated mice showed a reduction in CD31-immunopositive staining, reflecting a reduction in synovial vessels, and inhibition of synovial angiogenesis. Joint sections of mice treated with PBS control showed high numbers of infiltrating cells in the inflamed synovium, as well as invasion and erosion of bone by the synovium, associated with significant CD31 expression. Joints from mice treated with 1 mg/kg or 10 mg/kg RB200 were protected, with normal appearance, well-preserved joint architecture, and few CD31-positive blood vessels. These results indicate that the inhibition of EGFR-mediated responses can be for therapeutic use in the treatment of RA (see, e.g., Gompels et al. (2011) Arthritis Research & Therapy 13:R161).

[0735] The combination of TNF inhibition with an inhibitor of EGFR-mediated signaling can increase the therapeutic efficacy of anti-TNF therapies and be useful in the treatment of RA. It has been shown that the combined administration of a low dose of RB200 (0.5 mg/kg) with a sub-optimal dose of etanercept (1 mg/kg) inhibits the increase in clinical score and paw swelling, and completely abolishes CIA with a similar effectiveness to that observed with the administration of an optimal dose of etanercept (5 mg/kg) alone. In comparison, the administration of low-dose RB200 alone or low-dose etanercept alone was ineffective. A fluorescently-labeled monoclonal antibody against E-selectin can be used to localize endothelial activation in inflamed tissues in vivo, and is a sensitive, specific, and quantifiable molecular imaging technique for the evaluation of CIA. The combination of low-dose RB200 and low-dose etanercept decreased the amount of E-selectin detected in the paws to levels seen in healthy animals, whereas E-selectin was detected in the paws of CIA mice that received low-dose RB200 alone, or low-dose etanercept alone. While there was a dose-dependent effect of RB200 alone and etanercept alone on joint architecture, with progressively fewer severely destroyed joints and more joints with mild or moderate destruction, the most pronounced effect was observed with the combination treatment, with 64% of joints appearing normal, compared with 0% in mice treated with either low-dose RB200 alone or low-dose etanercept alone. The combination treatment also was more effective than high-dose etanercept alone, indicating the effectiveness of combining pan-EGFR and TNF-targeted therapies in promoting joint protection (see, e.g., Gompels et al. (2011) Arthritis Research & Therapy 13:R161).

c. RB242 Ligand Trap

[0736] The ligand trap designated RB242, derived from RB200, is an affinity optimized Fc-mediated triple mutant EGFR:HER3 heterodimer, comprising the mutations T15S and G564S in the EGFR ECD subdomains I and IV, respectively, with reference to the sequence of the mature EGFR protein (SEQ ID NO:415), and Y246A in the HER3 ECD subdomain II, with reference to sequence of the mature HER3 protein (SEQ ID NO:416). See, also SEQ ID NOS. 652 and 654, respectively.

[0737] Compared to the parent molecule, RB200, RB242 displayed an average of 22-fold improvement in affinity for various ligands, including EGF, TGF-α, HB-EGF and NRG1-β, and demonstrated improved anti-proliferative activity against cultured monolayer BxPC3 pancreatic cancer cells and in a mouse model of human non-small cell lung cancer. RB242 also exhibited a 10- to 60-fold improvement in the inhibition of ligand-induced HER phosphorylation, compared to RB200 (see, e.g., Jin et al. (2009) Mol. Med. 15(1-2):11-20). Compositions contain this ligand trap are provided and exemplified herein.

3. Optimized Multi-Specific, such as Bi-Specific, Growth Factor Trap Constructs

[0738] Provided herein are compositions containing mixtures of multi-specific, such as bi-specific, growth factor trap constructs, that are designed to be pan cell surface receptor therapeutics by specifically targeting more than one cell surface receptor, such as by binding to ligands for one or more receptors and/or interacting with one or more cell surface receptors, as long as the activity of more than one cell surface receptor is modulated. The constructs include those that target more than one HER family member, as well as those that target one or more HERs and additional receptors, such as a HER that contributes to or participates in the development of resistance to anti-HER therapies. The growth factor trap constructs contain multiple, in particular, two, chimeric fusion polypeptides that each contain all or a portion of the extracellular domain (ECD) of one receptor, particularly a member of the HER family, such as EGFR/HER1, HER2, HER3 or HER4, that is fused to a multimerization domain, such as the Fe of a human immunoglobulin (Ig), such as the Fe of human IgG. The ECD or portion thereof in the chimeric fusion polypeptide can be linked directly to the Fc, or indirectly, via a linker, such as a peptide linker. Typically, the C-terminus of the ECD polypeptide is linked to the N-terminus of the multimerization domain, such as an IgG Fc.

[0739] The growth factor trap constructs are expressed and purified as described, for example, in Sarup et al. (2008) Mol. Cancer Ther. 7(10):3223-3236; Gompels et al. (2011) Arthritis Research & Therapy 13:R161; Jin et al. (2009) Mol. Med. 15(1-2):11-20; and U.S. Patent Publication No. 2010/0055093. The following sections describe each portion of the multi-specific growth factor trap constructs provided herein.

a. The Extracellular Domain (ECD) Polypeptides

[0740] Provided herein are compositions containing the mixtures of multi-specific, such as bi-specific, homomultimers and heteromultimers of the growth factor trap constructs comprising the extracellular domains (ECDs) or portion(s) thereof, of two or more cell surface receptors (CSRs). In particular embodiments, the constructs in the mixtures include bi-specific, heterodimeric constructs, comprising two different cell surface receptors, as well as homodimers of each respective monomer. The heterodimer constructs in the compositions include a first ECD polypeptide and a second ECD polypeptide that each are linked directly or indirectly via a linker to a multimerization domain. In some embodiments, the first ECD polypeptide comprises the ECD of HER1/EGFR (corresponding to residues 1-621 of SEQ ID NO:415), or a portion thereof, and the second ECD polypeptide comprises the ECD of HER2 (corresponding to residues 1-628 of SEQ ID NO:424), HER3 (corresponding to residues 1-621 of SEQ ID NO:416), or HER4 (corresponding to residues 1-625 of SEQ ID NO:425), or a portion thereof, particularly the ECD of HER3 or HER4, or a portion thereof. In embodiments where the ECD polypeptide comprises less than the full-length ECD of a HER protein, it contains at least a sufficient portion of subdomains I, II and III for ligand binding and receptor dimerization. For example, the ECD can contain a sufficient portion of subdomains I and III for ligand binding, and/or can contain a sufficient portion of the ECD to dimerize with a cell surface receptor, including a sufficient portion of subdomain II. In some embodiments, the ECD contains subdomains I, II and III and at least module 1 of domain IV. There are two species of homodimers containing each ECD.

[0741] In some examples, the multi-specific, such as bi-specific, growth factor trap constructs contain a first ECD polypeptide that contains all or a portion of the ECD of HER1/EGFR, HER2, HER3 or HER4, in particular, EGFR/HER1, and a second chimeric polypeptide that contains the ECD from a different CSR, such as, for example, HER2, HER3, HER4, an insulin growth factor-1 receptor (IGF1-R), a vascular endothelial growth factor receptor (VEGFR, e.g., VEGFR1), a fibroblast growth factor receptor (FGFR, e.g., FGFR2 or FGFR4), a TNFR, a platelet-derived growth factor receptor (PDGFR), a hepatocyte growth factor receptor (HGFR), a tyrosine kinase with immunoglobulin-like and EGF-like domains 1 (TIE, e.g., TIE-1 or TEK (TIE-2)), a receptor for advanced glycation end products (RAGE), an Eph receptor, or a T-cell receptor.

[0742] In a particular embodiment, the first ECD polypeptide comprises the full-length ECD of HER1/EGFR (corresponding to residues 1-621 of SEQ ID NO:415), or a portion thereof (e.g., residues 1-501 of SEQ ID NO:415, which correspond to subdomains I-III and module 1 of domain IV), and the second ECD polypeptide comprises the full-length ECD of HER3 (corresponding to residues 1-621 of SEQ ID NO:416), or a portion thereof (e.g., residues 1-500 of SEQ ID NO:416, which correspond to subdomains I-III and module 1 of domain IV), where the ECD portion contains at least a sufficient portion of subdomains I and III to bind to a ligand of the HER receptor, and a sufficient portion of the ECD to dimerize with a cell surface receptor, including a sufficient portion of subdomain II. The first and second ECD polypeptides form a multimer, e.g., a dimer, through interactions of their multimerization domains. The resulting multimeric construct provided herein binds to additional ligands as compared to the first or second chimeric polypeptide alone, or homodimers thereof, and/or dimerizes with more cell surface receptors than the first or second chimeric polypeptide alone, or homodimers thereof. For example, the first and second ECD polypeptides form a heterodimer that binds to HER1 ligands and to HER3 ligands.

b. Modifications to the Extracellular Domains

[0743] In some embodiments, at least one of the ECD domains or a portion thereof, includes a modification that alters ligand binding, specificity or other activity or property, compared to the unmodified ECD polypeptide. In such multimeric constructs, a second ECD portion can be the same ECD domain, wild-type, or mutated form, or can be the ECD from any other cell surface receptor. The ECD or portion thereof of each monomer is linked to a multimerization domain directly or via a linker, or is linked to a second ECD or portion thereof directly, or via a linker. For example, the modification alters ligand binding, specificity or another activity or property of the ECD or full-length receptor containing such ECD, compared to the unmodified ECD or full-length receptor, whereby the heteromultimer exhibits the altered activity or property, such as altered ligand binding or specificity. Such modifications include any that eliminate or add or enhance an activity, such as binding to an additional ligand. Exemplary of such multimeric constructs, are constructs that contain at least one HER1 ECD that contains a mutation in subdomain III that increases its affinity for a ligand other than EGF. Such increase in affinity is at least 2- to 10-fold, typically 100, 1000, 10⁴, 10⁵, 10⁶-fold or more.

[0744] In particular embodiments, the growth factor trap construct is a heterodimer containing a HER1 (EGFR) chimeric fusion polypeptide and a HER3 chimeric fusion polypeptide, wherein each chimeric fusion polypeptide comprises the ECD of the receptor linked to the Fc of human IgG1, optionally via a peptide linker. Such chimeric fusion polypeptides are referred to herein as HER1/Fc and HER3/Fc. Typically, the C-terminus of the ECD polypeptide is linked to the N-terminus of the multimerization domain, such as an IgG1 Fc.

[0745] In some examples, the HER1 portion has been enhanced for ligand binding and/or biological activity. In other examples, the HER3 portion has been enhanced for ligand binding and/or biological activity. In yet another example, both HER1 and HER3 portions have been enhanced for ligand binding and/or biological activity.

[0746] Exemplary modifications include, for example, S418F in HER1 (with reference to the sequence of the mature protein, set forth in SEQ ID NO:415), which allows the HER3 ligand NRG2-β to stimulate HER1. The resulting ECD binds to or interacts with at least two ligands, one for HER1, such as EGF, and a second for HER3, such as NRG2-β. Other modifications include, for example, the mutations T15S and G564S in the EGFR/HER1 ECD subdomains I and IV, respectively, with reference to the sequence of the mature EGFR protein (SEQ ID NO:415), and Y246A in the HER3 ECD subdomain II, with reference to the sequence of the mature HER3 protein (SEQ ID NO:416), which, when combined, result in an average of 22-fold improvement in affinity for various ligands, including EGF, TGF-α, HB-EGF and NRG1-β. Additional mutations in the HER1 ECD include E330D/G588S, S193N/E330D/G588S, and T43K/S193N/E330D/G588S, with reference to the sequence of precursor HER1 (including the signal peptide) set forth in SEQ ID NO:426, and corresponding to E306D/G564S, S169N/E306D/G564S and T19K/S169N/E306D/G564S, with reference to the sequence of the mature HER1 polypeptide, set forth in SEQ ID NO:415. These mutations increase the HER1 binding affinity for the ligands EGF, HB-EGF, and TGF-α (see, e.g., U.S. Patent Publication No. 2010/0055093).

c. The Multimerization Domain and Linkers

[0747] In particular embodiments, the multimerization domain is an Fc domain, or a variant thereof, that effects multimerization. The Fc domain can be from any immunoglobulin (Ig) molecule, including from an IgG, IgM, or IgE. For example, the Fc domain can be from an IgG1, IgG2, IgG3 or IgG4, and includes the C_{H}2 and CH3 domains, and optionally, all or a portion of the hinge region. In certain examples, the Fc portion is the Fc of human IgG1, optionally including all or a portion of the hinge region, and corresponding to, for example, residues 99-330, 100-330, 104-330, 109-330, 111-330, 113-330, or 114-330, of SEQ ID NO:421.

[0748] Each ECD polypeptide in the multi-specific growth factor trap construct is linked to the Fc directly, or indirectly via a linker, such as a chemical or a polypeptide linker, forming a chimeric fusion polypeptide (i.e., an ECD/Fc fusion polypeptide). The multimerization domains, such as the Fc domains, of each chimeric fusion polypeptide, interact (via disulfide bonds in the case of Fc domains) to form a heteromultimer, such as a heterodimer.

[0749] The linker between the ECD and Fc portions of each chimeric fusion polypeptide can be a flexible peptide linker, such as, for example, a hinge region of an IgG, or other polypeptide linker comprised of small amino acids, such as glycine, serine, threonine, and/or alanine, at various lengths and combinations. For example, the linker can be (Gly)ₙ, (GGGGS)ₙ, (SSSSG)ₙ, or (AlaAlaProAla)ₙ, where n is 1-6, or can be GKSSGSGSESKS, GGSTSGSGKSSEGKG, GSTSGSGKSSSEGSGSTKG, GSTSGSGKPGSGEGSTKG, EGKSSGSGSESKEF, Gly-Arg-Met-Asp (GRMD), Ser-Cys-Asp-Lys-Thr (SCDKT), Asp-Lys-Thr-His (DKTH), or Glu-Lys-Thr-Ile-Ser (EKTIS) (see, SEQ ID NOs:427-445) or any other linker described elsewhere herein, or known in the art to be suitable for such purposes. Other linkers described throughout the disclosure herein can be used.

d. Modifications to the Fc Domains

[0750] The Fc domains in the growth factor trap constructs provided herein are modified to improve or enhance protein expression and purity, as well as to improve the pharmacodynamic and pharmacokinetic properties, including, for example, by extending the in vivo half-life and/or altering immune effector functions, as described below, and to result in production of heterodimers as the predominant, or only, product.

i. Modifications that Enhance Neonatal Fc Receptor (FcRn) Recycling

[0751] As described elsewhere herein, fusion with an IgG Fc increases the half-life of small protein therapeutics by taking advantage of neonatal Fc receptor (FcRn) binding, and also by increasing the molecular weight of the therapeutic, such that it is less rapidly cleared from the body, for example, by the kidneys. To improve the pharmacokinetics and overall pharmacology, residues within the Fc regions of the growth factor trap constructs provided herein can be mutated to increase the affinity for FcRn, generally by greater than 30-fold, further increasing the in vivo half-life.

[0752] In some embodiments, the Fc portions of the growth factor trap constructs herein are modified to enhance neonatal FcRn recycling, to increase the in vivo half-life. This can be effected by mutating residues at the interface of the C_{H}2 and C_{H}3 domains of the IgG Fc, which are responsible for binding to FcRn. Exemplary Fc modifications that increase binding to FcRn, and that can be introduced into the Fc portions of the growth factor trap constructs herein, include, but are not limited to, one or more of T250Q, T250R, M252F, M252W, M252Y, S254T, T256D, T256E, T256Q, V259I, V308F, E380A, M428L, H433K, N434F, N434A, N434W, N434S, N434Y, Y436H, M252Y/T256Q, M252F/T256D, M252Y/S254T/T256E, H433K/N434F/Y436H, N434F/Y436H, T250Q/M428L, T250R/M428L, M428L/N434S, V259I/V308F, V259I/V308F/M428L, E294del/T307P/N434Y, and T256N/A378V/S383N/N434Y, and combinations thereof (by EU numbering). Corresponding mutations by Kabat numbering and sequential numbering, with reference to the sequence of the IgG1 heavy chain constant domain set forth in SEQ ID NO:421, are set forth in Table 10 (IgG1 Fc Modifications that Enhance FcRn Binding) in the section describing Fc modifications. Other modifications, known in the art to confer enhanced or increased FcRn binding also are contemplated for use herein.

[0753] The modification of the Fc portions of the growth factor trap constructs provided herein to enhance FcRn binding and recycling, increases the in vivo half-life of the therapeutics, requiring the administration of lower doses and/or less frequent dosing, and improving the therapeutic efficacy, compared to RB200 and RB242.

[0754] There are numerous approaches to increasing the short serum half-life of small polypeptide or protein therapeutics. PEGylation, which is increases the serum half-life of small protein therapeutics, has a disadvantage. PEGylation can decrease potency or activity of a protein therapeutic, can result in heterogeneity, and can result immunoreactivity of the protein. Other approaches involve fusion to albumin, which can improve protein circulation by increasing the molecular weight and reducing renal clearance.

[0755] Serum half-life also can be increased by fusion to the Fc portion of IgGs. The long circulating half-life of approximately 2-3 weeks, and slow clearance rate, of IgGs results at least in part, from their interaction with the neonatal Fc receptor (FcRn), which binds IgGs with high affinity at acidic pH, and releases them at neutral or higher pH. FcRn binds to the Fc portion (within the C_{H}2-C_{H}3 domains) of pinocytosed IgGs in the acidic (α pH 6) endosome in a 2:1 FcRn:IgG configuration (bivalent interaction), traffics them away from the lysosomal degradation pathway and to the cell surface, and recycles them back into circulation after exposure to the extracellular physiological pH (˜7.4), at which the Fc-FcRn complex dissociates. Poor binding to FcRn at acidic pH results in trafficking of an antibody to the lysosome where it is degraded. Recycling receptors, such as FcRn, also provide a route for the transport of IgGs across the epithelium (transcytosis) and into the blood stream. Leveraging the interaction with FcRn can improve protein transport across epithelial barriers, such as in the gut and the lungs, allowing for noninvasive administration. Residues in the Fc C_{H}2 and C_{H}3 domains are involved in FcRn binding, and their mutation in mAbs has been shown to affect the in vivo serum half-life. The circulation and delivery of small protein therapeutics can be improved by fusing them to the Fc domain of IgG, such that the resulting fusion proteins bind to FcRn and take advantage of the IgG serum stabilization pathway. Fusion with an Fc domain also increases the molecular weight of the therapeutic, reducing renal clearance, but can be undesirable due to the potentially reduced tissue penetration and specific activity of the fusion protein. Alternatively, studies have shown that short FcRn-binding peptides (FcRnBPs) allow for the interaction of small proteins with FcRn, obviating the need for fusion to a high molecular weight Fc domain. For example, fusion with an FcRnBP increases the molecular weight by approximately 3 kDa, in comparison to fusions with Fc or albumin, which increase the molecular weight by approximately 50-70 kDa (see, e.g., Datta-Mannan et al. (2019) Biotechnol. J. 14:1800007; Sockolosky et al. (2012) Proc. Natl. Acad. Sci. USA 109(40):16095-16100).

[0756] For example, short (16 residue) linear and cyclic FcRnBPs (see, e.g., SEQ ID NOs: 417-420) have been fused to the C-terminus, N-terminus, or both, of Fab heavy and light chains (FcRnBP-Fab constructs), with 1-4 FcRnBPs per Fab. Studies of the pharmacokinetics in cynomolgus monkeys have shown that the FcRn binding of FcRnBP-Fab constructs increases as the number of peptides fused to the Fab increases. This results from increased avidity, with constructs containing four linear FcRnBPs fused to the N- and C-termini of the heavy and light chains of the Fab showing the greatest improvement in pharmacokinetics in cynomolgus monkeys relative to the parental Fab. For example, the half-life improved from 3.7 hours for the parental Fab, to between 15-60 hours for the various FcRnBP-Fab constructs (see, e.g., Datta-Mannan et al. (2019) Biotechnol. J. 14:1800007). While these results indicate an improvement in serum half-life, it is still much lower than the half-life for an IgG, which is about 2-3 weeks. The use of FcRnBPs also does not reduce renal clearance, as they do not significantly increase the molecular weight of the therapeutics.

[0757] As discussed above, fusion with an IgG Fc increases the half-life of small protein therapeutics by taking advantage of FcRn binding, and also by increasing the molecular weight of the therapeutic, such that it is less rapidly cleared from the body, for example, by the kidneys. To improve the pharmacokinetics and overall pharmacology, residues within the Fc region can be mutated to increase the affinity for FcRn, generally by greater than 30-fold, further increasing the in vivo half-life. The Fc region spanning the interface of the C_{H}2 and C_{H}3 domains interacts with FcRn. Human Fc residues identified to play a role in FcRn binding include, for example, L251, M252, I253, S254, L309, H310, Q311, L314, E380, N434, H435 and Y436 (by EU numbering, see Tables 3-4). Mutations in residues located at the Fc-FcRn interface, including M252, S254, T256, H433, N434 and Y436 (by EU numbering), improve the stability of the human FcRn-IgG1 complex. For example, the replacements M252Y/S254T/T256E and H433K/N434F/Y436H result in an 11-fold and 6.5-fold improvement in binding to human FcRn at pH 6.0 relative to the wild-type IgG1, respectively, with efficient release at pH 7.4. The combination of these replacements results in a 57-fold increase in binding affinity to FcRn. Additional mutations in IgG1 Fc that showed an improvement in binding to FcRn include, for example, M252W, M252Y, M252Y/T256Q, M252F/T256D, E380A, and N434F/Y436H (see, e.g., Dall'Acqua et al. (2002) J. Immunol. 169:5171-5180).

[0758] The triple substitution M252Y/S254T/T256E, when introduced into the CH2 domain of MEDI-524, a humanized anti-respiratory syncytial virus (RSV) mAb, increased the serum half-life of the mAb approximately 4-fold in cynomolgus monkeys when compared to unmodified MEDI-524. When introduced into the Fc portion of MEDI-522, a humanized, affinity-optimized mAb directed against the human αaᵥβ₃ integrin complex, the replacements M252Y/S254T/T256E (YTE) reduced its ADCC activity and its binding to human FcγRIIIA (F158 allotype). The ADCC activity of MEDI-522-YTE can be restored, and increased in comparison to unmodified MEDI-522, by introduction of the ADCC-enhancing replacements S239D/A330L/I332E (by EU numbering), indicating that the replacements YTE provide a reversible mechanism to modulate the ADCC function of a human IgG1 (see, e.g., Dall'Acqua et al. (2006) J. Biol. Chem. 281(33):23514-23524).

[0759] Residues at positions 250, 314 and 428 (by EU numbering) of the human IgG heavy chain, which are conserved among all four human IgG subtypes, also are located near the Fc-FcRn interface. The mutations T250Q, M428L and T250Q/M428L, when introduced into the Fc of a human IgG2 mAb, resulted in an increase in binding to FcRn at pH 6.0 of ˜3-, 7- and 28-fold, respectively, with no binding observed at pH 7.5. When the pharmacokinetics of the mutants were evaluated in rhesus monkeys, it was found that the mean clearance, i.e., the volume of serum antibody cleared per unit of time, was ˜1.8-fold lower for the M428L mutant, and ˜2.8-fold lower for the T250Q/M428L mutant, while the elimination half-life was ˜1.8-fold longer for the M428L mutant and ˜1.9-fold longer for the T250Q/M428L mutant, compared to unmodified antibody. Since these residues are conserved among IgG subtypes, the mutations M428L and T250Q/M428L are expected to have similar effects in human IgG1, IgG3 and IgG4 antibodies (see, e.g., Hinton et al. (2004) J. Biol. Chem. 279(8):6213-6216). The modifications T250R/M428L were shown to result in selective binding to FcRn at pH 6.0, and a 2.8-fold decreased degradation of serum IgG2 and IgG1 in rhesus monkeys (see, e.g., Saxena et al. (2016) Front. Immunol. 7:580).

[0760] The mutation N434A (by EU numbering), when introduced into the human anti-HER2 IgG1 trastuzumab, resulted in ˜4-fold higher affinity towards human FcRn over unmodified antibody at pH 6, but negligible binding at pH 7.4. The N434A variant had increased exposure, decreased clearance (˜2-fold) and increased half-life (˜2-fold) compared to the wild-type antibody when tested in vivo in cynomolgus monkeys. In contrast, the mutation N434W, which resulted in ˜80-fold increased binding to FcRn at pH 6, exhibited a clearance rate similar to wild-type; this mutant also exhibited significant binding to FcRn at pH 7.4, indicating that maintaining pH-dependent binding of Fc mutants to FcRn is critical for improving the in vivo pharmacokinetics (Yeung et al. (2009) J. Immunol. 182:7663-7671). The N434A mutation also counters the poor FcRn affinity that can result from the introduction of mutations that increase binding to FcγRs; N434A is typically added to the mutations S298A/E333A/K334A to create a variant with enhanced FcγR binding and normal or improved FcRn binding. Fc mutations that improve FcRn binding also include N434Y, E294del/T307P/N434Y and T256N/A378V/S383N/N434Y. The E294 deletion results in higher sialylation of the N297 glycan on the Fc, which increases antibody half-life in vivo. Indicating that sialylation also plays a role in regulating serum half-life (see, e.g., Saunders, K. O. (2019) Front. Immunol. 10:1296).

[0761] The replacements M428L/N434S (by EU numbering), when introduced into the humanized anti-VEGF IgG1 antibody bevacizumab (sold under the trademark Avastin®), resulted in an 11-fold increase in affinity to FcRn at pH 6.0, and extended the in vivo serum half-life in cynomolgus monkeys from 9.7 days to 31.1 days, representing a 3.2-fold improvement. The M428L/N434S modification resulted in similar increases in FcRn binding and half-life extension when introduced into the anti-EGFR antibody cetuximab, which is rapidly cleared due to receptor-mediated internalization. The half-life extension of these anti-tumor antibodies correlated with enhanced tumor reduction in vivo in a mouse model, indicating that the in vivo therapeutic efficacy of the antibodies is increased when the pharmacokinetics, such as clearance rate, are improved. Other mutations engineered into the bevacizumab Fc include (by EU numbering): N434S, with ˜3-fold improvement in FcRn binding and ˜2.8 fold increase in serum half-life in mice; V259I/V308F, with ˜6-fold improvement in FcRn binding, and ˜3-fold and ˜2-fold increases in serum half-life in mice and cynomolgus monkeys, respectively; M252Y/S254T/T256E, with ˜7-fold improvement in FcRn binding, and ˜4-fold and 2.5-fold increases in serum half-life in mice and cynomolgus monkeys, respectively; and V259I/V308F/M428L, with ˜20-fold improvement in FcRn binding, and ˜4-5-fold and 2.6-fold increases in serum half-life in mice and cynomolgus monkeys, respectively (Zalevsky et al. (2010) Nat. Biotechnol. 28(2):157-159).

[0762] The above-identified mutations, and other such mutations, can be introduced into the IgG Fc region in constructs provided herein. These include constructs, such as those of Formulae 1 and 2, in which the linker includes an Fc or an Fc dimer, depending upon the structure of the construct.

[0763] In some embodiments, the IgG Fc regions in the constructs herein are modified to enhance neonatal FcR recycling to increase in vivo half-life. This can be effected by mutating residues at the interface of the CH2 and CH3 domains of IgG Fc, which are responsible for binding to FcRn. These include, but are not limited to, the residues T250, L251, M252, I253, S254, T256, V259, T307, V308, L309, H310, L314, Q311, A378, E380, 5383, M428, H433, N434, H435 and Y436, by EU numbering. Exemplary Fc modifications that increase binding to FcRn include, but are not limited to, one or more of T250Q, T250R, M252F, M252W, M252Y, S254T, T256D, T256E, T256Q, V259I, V308F, E380A, M428L, H433K, N434F, N434A, N434W, N434S, N434Y, Y436H, M252Y/T256Q, M252F/T256D, M252Y/S254T/T256E, H433K/N434F/Y436H, N434F/Y436H, T250Q/M428L, T250R/M428L, M428L/N434S, V259I/V308F, V259I/V308F/M428L, E294del/T307P/N434Y, T256N/A378V/S383N/N434Y, and combinations thereof, by EU numbering. Table 10, above (reproduced below), shows the corresponding mutations by Kabat numbering and sequential numbering, with reference to the sequence of the IgG1 heavy chain constant domain set forth in SEQ ID NO:421. Other modifications, known in the art to confer enhanced or increased FcRn binding also are contemplated for use herein.

TABLE 10
IgG1 Fc Modifications that Enhance FcRn Binding

| | | Modifications by |
|---|---|---|
| Modifications by | Modifications by | sequential Numbering |
| EU Numbering | Kabat Numbering | (SEQ ID NO: 421) |
| T250Q | T263Q | T133Q |
| T250R | T263R | T133R |
| M252F | M265F | M135F |
| M252W | M265W | M135W |
| M252Y | M265Y | M135Y |
| S254T | S267T | S137T |
| T256D | T269D | T139D |
| T256E | T269E | T139E |
| T256Q | T269Q | T139Q |
| V259I | V272I | V142I |
| V308F | V327F | V191F |
| E380A | E405A | E263A |
| M428L | M459L | M311L |
| H433K | H464K | H316K |
| N434F | N465F | N317F |
| N434A | N465A | N317A |
| N434W | N465W | N317W |
| N434S | N465S | N317S |
| N434Y | N465Y | N317Y |
| Y436H | Y467H | Y319H |
| M252Y/T256Q | M265Y/T269Q | M135Y/T139Q |
| M252F/T256D | M265F/T269D | M135F/T139D |
| M252Y/S254T/T256E | M265Y/S267T/T269E | M135Y/S137T/T139E |
| H433K/N434F/Y436H | H464K/N465F/Y467H | H316K/N317F/Y319H |
| N434F/Y436H | N465F/Y467H | N317F/Y319H |
| T250Q/M428L | T263Q/M459L | T133Q/M311L |
| T250R/M428L | T263R/M459L | T133R/M311L |
| M428L/N434S | M459L/N465S | M311L/N317S |
| V259I/V308F | V272I/V327F | V142I/V191F |
| V259I/V308F/M428L | V272I/V327F/M459L | V142I/V191F/M311L |
| E294del/T307P/N434Y | E311del/T326P/N465Y | E177del/T190P/N317Y |
| T256N/A378V/S383N/N434Y | T269N/A401V/S408N/N465Y | T139N/A261V/S266N/N317Y |

ii. Modifications that alter Effector Functions

[0764] As described herein, immune effector functions mediated by IgG Fcs include complement-dependent cytotoxicity (CDC), antibody-dependent cell-mediated cytotoxicity (ADCC; also called antibody-dependent cellular cytotoxicity), and antibody-dependent cell-mediated phagocytosis (ADCP; also called antibody-dependent cellular phagocytosis). The Fc regions of the growth factor trap constructs herein can be mutated or modified, as discussed below and elsewhere herein, to eliminate, reduce, or enhance, immune effector functions, including, for example, any one or more of CDC, ADCC and ADCP.

[0765] Since the growth factors targeted by the growth factor trap constructs are present as membrane proteins and as free (i.e., soluble) ligands, in certain embodiments, the immune effector functions, particularly ADCC, of the Fc portion in the ECD/Fc fusion polypeptides are retained. In alternative embodiments, in addition to human IgG1 Fc, other Fc regions also can be included in the ECD/Fc chimeric fusion polypeptides provided herein. For example, where effector functions mediated by Fc/FcγR interactions are to be minimized, fusion with IgG isotypes that poorly recruit complement or effector cells, and do not exhibit effector functions, such as, for example, the Fc of IgG2 or IgG4, is contemplated. This approach can be used in instances where effector functions are not required, or would be detrimental, for example, in the context of autoimmune and inflammatory diseases and disorders.

[0766] In certain examples, the Fc portion can be modified to enhance or increase immune effector functions. This can be achieved, for example, by modifications that increase binding to C1q (for CDC) and/or certain, activating FcγRs (e.g., FcγRI, FcγRIIa, FcγRIIc, FcγRIIIa and FcγRIIIb). Fc regions modified to have increased binding to Fc receptors can be more effective in facilitating the destruction of cancer cells in patients, even when linked with an ECD polypeptide. Antibodies destroy tumor cells via a number of possible mechanisms, including, for example, anti-proliferation via blockade of growth pathways, intracellular signaling leading to apoptosis, enhanced down-regulation and/or turnover of receptors, ADCC, ADCP, CDC, and promotion of the adaptive immune response. Thus, in embodiments where the growth factor trap constructs herein are used for the treatment of cancer, the Fc portions of the constructs can be modified to enhance or increase immune effector functions. Table 14 (IgG1 Fc Modifications that Enhance Immune Effector Functions) in Section F.3.d.ii.a) (Ekons) summarizes Fc modifications that increase binding to FcγRs or C1q, and thus, enhance immune effector functions, including ADCC, ADCP and CDC, and provides the corresponding modifications by Kabat numbering and by sequential numbering, with reference to the sequence of the IgG1 heavy chain constant domain set forth in SEQ ID NO:421. Any one or more of these modifications, alone or in various combinations, can be introduced into the IgG1 Fc portions of the growth factor trap constructs provided herein. Other modifications, known in the art to confer enhanced or increased immune effector functions, also are contemplated for use herein.

[0767] In other embodiments, the Fc portions of the growth factor trap constructs provided herein are modified to decrease or eliminate immune effector functions. This can be achieved, for example, by modifications that decrease or abrogate binding to C1q (for CDC) and/or certain, activating FcγRs (e.g., FcγRI, FcγRIIa, FcγRIIc, FcγRIIIa and FcγRIIIb). This is desirable, for example, where antagonism, but not killing of the cells bearing a target antigen is desired, or where the reduction of undesired or detrimental immune effector functions, such as unwanted pro-inflammatory cytokine release and off-target cytotoxicity, is necessary. Thus, in embodiments where the growth factor trap constructs provided herein are used for the treatment of chronic inflammatory and autoimmune diseases and disorders, such as RA, the Fc portions of the constructs can be modified to reduce or eliminate immune effector functions.

[0768] Table 11 (IgG1 Fc Modifications that Reduce or Eliminate Immune Effector Functions), in the section describing Enhancement of or Reduction/Elimination of Fc Immune Effector Functions, summarizes exemplary IgG1 Fc modifications that reduce or eliminate binding to activating FcγRs and/or C1q, and thus, reduce or eliminate immune effector functions, including ADCC, ADCP and CDC, and can be introduced into the Fc regions of the growth factor trap constructs herein. The table provides the corresponding modifications by Kabat numbering and by sequential numbering, with reference to the sequence of the IgG1 heavy chain constant domain set forth in SEQ ID NO:421. Any one or more of these modifications, alone or in various combinations, can be introduced into the IgG1 Fc portions of the growth factor trap constructs provided herein. Other modifications, known in the art to reduce or eliminate immune effector functions, also are contemplated for use herein.

[0769] The Fc portions of the growth factor trap constructs provided herein also can be modified to increase binding to inhibitory FcγRs, which results in the suppression of the immune response. Therapeutic antibodies with immunosuppressive Fc modifications are advantageous for the treatment of inflammatory diseases. These mutations can be incorporated into the Fc portions of the growth factor trap constructs herein that are intended for the treatment of diseases and conditions with an inflammatory component or etiology or involvement, such as, for example, RA, and other inflammatory and autoimmune diseases.

[0770] Modifications that increase binding to, or that confer selective binding to, inhibitory FcγRIIb, and/or FcγRI but not FcγRIIIa, can be engineered into the IgG1 Fc regions in the growth factor trap constructs provided herein. These modifications include, but are not limited to, one or more of S267E, N297A, L328F, L351S, T366R, L368H, P395K, S267E/L328F, L351S/T366R/L368H/P395K, and combinations thereof, by EU numbering. Table 11 (IgG1 Fc Modifications that Increase Binding to Inhibitory FcγRIIb) in Section F.3.d.ii.a shows the corresponding replacements by Kabat numbering, and by sequential numbering, with reference to the sequence of the IgG1 heavy chain constant domain, set forth in SEQ ID NO:421. These modifications were summarized in the section above describing IgG1 Fc Modifications that Increase Binding to Inhibitory FcγRIIb.

e. Enhancement of or Reduction/Elimination of Fc Immune Effector Functions

[0771] There are four human IgG subclasses that differ in effector functions, circulating half-life and stability. IgG1 has Fc effector functions, is the most abundant IgG subclass, and is the most commonly used subclass in FDA-approved therapeutic proteins. IgG2 is deficient in Fc effector functions, but dimerizes with other IgG2 molecules, and is unstable due to scrambling of disulfide bonds in the hinge region. IgG3 has Fc effector functions, and a very long, rigid hinge region. IgG4 is deficient in Fc effector functions, has a shorter circulating half-life than the other subclasses, and the IgG4 dimer is biochemically unstable due to the presence of a single disulfide bond in the hinge region, which leads to the exchange of H chains between different IgG4 molecules. Thus, Fc regions from IgG2 and IgG4 do not possess effector functions, and can be used in instances where effector functions are not required or would be detrimental, for example, in the context of autoimmune and inflammatory diseases and disorders.

[0772] Most approved therapeutic mAbs belong to the human IgG1 subclass, and can interact with the humoral and cellular components of the immune system. For example, antibodies engage the humoral immune response via interaction with complement protein C1q, which initiates the complement cascade, resulting in the formation of the membrane attack complex which induces cytolysis in the target cell (i.e., complement-dependent cytotoxicity (CDC)), and engage the cellular immune response by interaction with Fc gamma receptors (FcγRs). The FcγRs include the FcγRI (CD64), FcγRII (CD32) and FcγRIII (CD16) classes that differ in their cell surface expression and Fc binding affinities. The five activating FcγRs include the high affinity FcγRI that can bind monovalent antibodies, and the lower affinity FcγRIIa, FcγRIIc, FcγRIIIa and FcγRIIIb, which require avidity-based interactions. FcγRIIb is the only inhibitory receptor. Upon binding of an Fc to an activating receptor, intracellular signaling pathways, modulated through the phosphorylation of immunoreceptor tyrosine-based activation motifs (ITAMs), result in effector functions, such as antibody-dependent cell-mediated cytotoxicity (ADCC; also called antibody-dependent cellular cytotoxicity) and antibody-dependent cell-mediated phagocytosis (ADCP; also called antibody-dependent cellular phagocytosis), as well as inflammation due to the induction of cytokine secretion. Signaling via the inhibitory FcγRIIb, which is modulated through the phosphorylation of immunoreceptor tyrosine-based inhibitory motifs (ITIMs), recruits phosphatases that counter-balance the activating signaling pathways (see, e.g., Wang et al. (2018) Protein Cell 9(1):63-73).

[0773] The hinge and proximal CH2 amino acid sequence (lower hinge-upper CH2 domain region), and glycosylation of the conserved N297 residue (by EU numbering) in the CH2 domain Asn-X-Ser/Thr glycosylation motif of the Fc region, mediate the interactions of antibodies with FcγRs and complement protein C1q. Antibody/Fc engineering has been used to modify the immune effector functions of antibodies by altering their binding to C1q and various Fcγ receptors. The CDC, ADCC and ADCP activities of therapeutic mAbs can thus be increased or decreased, depending on the application. For example, the efficacy of anti-cancer mAbs depends in part on their induction of FcγR effector functions. The effector function includes the activation of natural killer (NK) cells via FcγRIIIa and the subsequent ADCC activity and release of inflammatory cytokines, the induction of macrophage-mediated ADCP via interactions with multiple FcγRs, and the recruitment and activation of other immune cells, such as neutrophils, the primary receptor for NK cell-mediated ADCC. FcγRIIIa has two polymorphic variants: one with V158, which has a higher affinity for IgG1; and one with F158, with a lower affinity for IgG1. Cancer patients with the high affinity V158 polymorphism can have better outcomes following treatment with cetuximab, trastuzumab and rituximab, compared to patients with the low affinity F158 polymorphism. Results such as these highlight the role that FcγR-mediated immune effector functions play in therapies, and indicate that engineering antibodies and related molecules to have increased affinity to FcγRs can enhance the therapeutic efficacy (see, e.g., Wang et al. (2018) Protein Cell 9(1):63-73).

[0774] Residues in the lower hinge and proximal CH2 regions of IgGs have been determined to be critical for binding to FcγRs. Residues that are within 5 angstroms from the FcγR:Fc interface for FcγRI, FcγRIIa, FcγRIIb and FcγRIIIb, include the residues (by EU numbering) P232, E233, L234, L235, G236, G237, P238, S239 (corresponding to residues P115-S122, with reference to SEQ ID NO:421), D265, V266, S267, H268, E269, D270 (corresponding to residues D148-D153, with reference to SEQ ID NO:421), Y296, N297, S298, T299 (corresponding to residues Y179-T182, with reference to SEQ ID NO:421), and N325, K326, A327, L328, P329, A330, P331 and 1332 (corresponding to residues N208-I215, with reference to SEQ ID NO:421) (see, e.g., Wang et al. (2018) Protein Cell 9(1):63-73).

[0775] Modifications of Fc that enhance or decrease ADCC activity and/or enhance affinity/binding to receptors are known to those of skill in the art. For example, Fc modifications that increase the IgG1 affinity for and binding to FcγRIIIa, and/or enhance ADCC function, include the replacements (by EU numbering): F243L/R292P/Y300L/V305I/P396L, L235V/F243L/R292P/Y300L/P396L, F243L/R292P/Y300L, S239D, I332E, S239D/I332E, S239D/A330L/I332E, S298A/E333A/K334A, and the combinations of L234Y/L235Q/G236W/S239M/H268D/D270E/S298A in one heavy chain and D270E/K326D/A330M/K334E in the opposing heavy chain, and L234Y/G236W/S298A in one heavy chain and S239D/A330L/I332E in the opposing heavy chain. Additionally, the mutations A327Q/P329A (interact with FcγRI), D265A/S267A/H268A/D270A/K326A/S337A (interact with FcγRIIa), G236A (interacts with FcγRIIa), and T256A/K290A/S298A/E333A/K334A (interact with FcγRIIIa), result in high affinity interactions with FcγRs.

[0776] Fc modifications that increase binding to FcγRIIa and FcγRIIIa, and enhance ADCC and ADCP, include (by EU numbering) G236A/I332E, G236A/S239D/I332E (also increases binding to FcγRI), and G236A/S239D/A330L/I332E (see, e.g., Wang et al. (2018) Protein Cell 9(1):63-73; Saxena et al (2016) Front. Immunol. 7:580; and Saunders, K. O. (2019) Front. Immunol. 10:1296).

[0777] Glyco-engineering of IgGs, which contain a conserved N-linked glycosylation site at residue N297 in the C_{H}2 domain, can enhance Fc effector function. Glycosylation of N297 is essential for maintaining Fc conformation and mediating its interactions with FcγRs (and C1q). The glycan present at residue N297 typically has two N-acetylglucosamine (GlcNAc), three mannose, and two more GlcNAc linked to the mannose, to form a biantennary complex glycan. Additional fucose, galactose, sialic acid and GlcNAc can be added to the core glycan structure. IgGs found circulating in human sera generally are fucosylated, but recombinant IgG production can alter the glycan composition by expressing the antibody in plant cells, knocking in or out specific glycosidases, or in vitro enzymatic digestion of the glycosylated IgG; because both heavy chains are glycosylated, a single IgG molecule can have glycan heterogeneity. The glycan directly affects FcγR binding. For example, the N297 glycan on the Fc can clash with glycans on the FcγRIII protein, resulting in poor engagement of effector cells that mediate ADCC. Fc regions containing different glycans at N297 adopt different hinge region conformations, which can affect the Fc's ability to interact with FcγRs. Expression of β(1,4)-N-acetylglucosaminyltransferase III when expressing IgG generates an antibody that is glycosylated at position N297 with a biantennary glycan; this antibody has increased binding to FcγRIIIa and enhanced ADCC activity. It has been demonstrated that fucose deficient (afucosylated/non-fucosylated) IgG1s exhibit up to 50-fold increased binding to FcγRIIIa and enhanced ADCC activity. Two glyco-engineered (afucosylated) mAbs, Obinutuzumab (anti-CD20) and mogamulizumab (anti-CCR4) have been approved for clinical use, indicating the potential for glyco-engineering for enhanced effector function, and its translation into clinically approved therapeutics (see, e.g., Wang et al. (2018) Protein Cell 9(1):63-73; Saxena et al. (2016) Front. Immunol. 7:580; and Saunders, K. O. (2019) Front. Immunol. 10:1296).

[0778] The Fc also can be modified to bind with a wider range of Fc receptors. Fc receptors for isotypes other than gamma (i.e., IgA, IgM and IgE) exist on certain leukocytes, and by modifying an Fc region to engage with multiple Fc receptors, an antibody with expanded abilities to engage effector cells is created. Neutrophils, which are the most abundant leukocytes in the body, engage the Fc of IgA antibodies via the FcαRI receptor. For example, to engage FcγRs and FcαRI, single domains of IgA2 were added to the end of the IgG1 constant region, creating a four-domain constant region, CH1g-CH2g-CH3g-CH3a. The C_{H}i domain of IgG1 was replaced with the alpha 1 constant region domain, generating a constant region (CH1a-CH2g-CH3g-CH3a) that is closer in structure to the alpha constant region. These four-domain, cross-isotype IgGA chimeric antibodies bound to J chain similarly to natural IgA2, had reduced transport by polymeric Ig receptor, had a 3-5-fold decrease in FcγRI affinity, and the short serum half-life of IgA2 instead of the protracted serum circulation of IgG1. The four-domain, cross-isotype IgGA chimeric antibodies, however, had the ability to mediate complement-dependent lysis of sheep red blood cells and were more pH-resistant than IgG1. Another cross-isotype Fc was created by fusing the gamma 1 and alpha constant regions together to create a tandem G1-A Fc region, in which the hinge, CH2 and CH3 domains of IgA2 were fused to the C-terminus of IgG1. This tandem cross-isotype IgG/IgA fusion showed similar expression levels, antigen binding and thermostability as IgG1, and, in vitro, bound to FcαRI and FcγRI, FcγRII, FcγRIIIa and FcRn, with affinities similar to wild-type IgA and IgG, respectively. The binding to various FcRs resulted in ADCC activity with polymorphonuclear cells and NK cells; C1q binding, however, was reduced 3-fold compared to IgG1. The tandem IgG/IgA had an in vivo half-life similar to that of IgG1 in BALB/c mice. An alternative cross-isotype antibody was created by replacing the C_{H}3 domain and C_{H}2 α1 loop residues 245-258 (by EU numbering, corresponding to the sequence PKPKDTLMISRTPE; (residues 128-141 of SEQ ID NO:421)) of the IgG1 constant region, with the structurally analogous regions of the IgA constant region. This chimeric Fc was able to bind FcγRI, FcγRIIa and FcαRI, and antibodies containing the chimeric Fc mediated ADCC with polymorphonuclear cells and ADCP with macrophages, and activated complement, but lacked binding to FcRn, which regulates antibody half-life; thus, further optimization is required for effective in vivo use (see, e.g., Saunders, K. O. (2019) Front. Immunol. 10:1296).

[0779] Another approach to enhance FcγR binding is the multimerization of IgG, which has shown promise in the treatment of autoimmune diseases. The IgG multimers are generated, for example, by adding heterologous multimerization domains such as isoleucine zippers, or by adding another hinge region at the N-terminus of the natural hinge, or by adding another hinge region at the C-terminus of the C_{H}3 domain. IgG hexamers are created by appending the IgM tailpiece to the C-terminus of the IgG1 Fc and creating a cysteine bond at position 309; this multimeric IgG bound strongly to FcγRI, FcγRIIa and FcγRIIIa, and weakly to FcγRIIb and FcγRIIIb. The various multimeric IgGs have increased binding to FcγRI, FcγRIIb and FcγRIII, compared to monomeric IgG, and have shown promise in preclinical models of arthritis, neuropathy, and autoimmune myasthenia gravis. This multimeric IgG design is being further optimized to fine-tune which immune receptors, including FcRn, can bind to the multimer (see, e.g., Saunders, K. O. (2019) Front. Immunol. 10:1296).

[0780] Residues in the Fc region of IgG that are involved in the interaction with and binding to C1q (and hence, CDC) include (by EU numbering) S267, D270, K322, K326, P329, P331 and E333. Fc modifications that have been shown to enhance CDC by increasing C1q binding include, for example, K326A, E333A, K326A/E333A, K326W, K326W/E333S, K326M/E333S, C220D/D221C, H268F/S324T, S267E, H268F, S324T, S267E/H268F/S324T, and G236A/I332E/S267E/H268F/S324T (all by EU numbering). In the upper hinge region of the IgG1 Fc, substituting Trp, in various combinations, at positions 222, 223 and 224 (i.e., K222W, T223W, and H224W, by EU numbering), increased C1q binding and CDC activity relative to wild-type IgG1 without affecting FcγRIIIa binding and ADCC activity. Specifically, the mutations included K222W/T223W, K222W/T223W/H224W and D221W/K222W. The mutations C220D/D221C and C220D/D221C/K222W/T223W, also increased C1q binding and CDC activity (see, e.g., Wang et al. (2018) Protein Cell 9(1):63-73; Saxen et al. (2016) Front. Immunol. 7:580; Saunders, K. O. (2019) Front. Immunol. 10:1296; and Dall'Acqua et al. (2006) J Immunol. 177:1129-1138).

[0781] IgG3 has the best in vitro binding to C1q; combining the C_{H}i and hinge regions of IgG1 with the CH2 and CH3 regions of IgG3 (to retain ADCC activity from IgG1 and CDC activity from IgG3), creating IgG1/IgG3 cross-subtype antibodies, also increases C1q binding and enhances CDC activity. Another IgG1/IgG3 cross-subtype antibody with increased C1q binding and enhanced CDC activity includes the C_{H}I, hinge and C_{H}3 of IgG1, and the C_{H}2 of IgG3; these modifications allow for increased Cq1 binding since C1q binds the C_{H}2 domain, as well as easy purification, since protein A binds the C_{H}3 domain. Additionally, the modifications E345R/E430G/S440Y, which result in the formation of IgG hexamers with K322 oriented in a position to favorably interact with the hexameric C1q headpiece, enhanced CDC activity. The mutation E345R alone also results in IgG hexamer formation, with increased C1q binding and enhanced CDC activity (see, e.g., Wang et al. (2018) Protein Cell 9(1):63-73; Saxena et al. (2016) Front. Immunol. 7:580; Saunders, K. O. (2019) Front. Immunol. 10:1296).

[0782] Glycoengineering also can be used to improve complement binding; the N297 glycan within the C_{H}2 domain of the Fc can be modified to improve CDC activity. For example, an overabundance of galactosylation in the IgG1 Fc increases C1q binding and CDC activity compared to the unmodified glycoform of IgG1, and also improves thermostability. Thus, galactosylating the Fc can be used to generate a stable biologic with enhanced CDC activity (see, e.g., Saunders (2019) Front. Immunol. 10:1296).

[0783] Table 14, below, summarizes the Fc modifications that increase binding to FcγRs or C1q, and thus, enhance immune effector functions, including ADCC, ADCP and CDC. The table provides the corresponding modifications by Kabat numbering and by sequential numbering, with reference to the sequence of the IgG1 heavy chain constant domain set forth in SEQ ID NO:421. Any one or more of these modifications, alone or in various combinations, can be introduced into the IgG1 Fc portions of the constructs provided herein. Other modifications, known in the art to confer enhanced or increased immune effector functions, also are contemplated for use herein or as described herein.

TABLE 14
IgG1 Fc Modifications that Enhance Immune Effector Functions

| | | Modifications by | |
|---|---|---|---|
| Modifications by | Modifications by | sequential Numbering | |
| EU Numbering | Kabat Numbering | (SEQ ID NO: 421) | Effects |
| S239D | S252D | S122D | Increase binding to |
| | | | FcγRIIIa; enhance ADCC |
| I332E | I351E | I215E | Increase binding to |
| | | | FcγRIIIa; enhance ADCC |
| S239D/I332E | S252D/I351E | S122D/I215E | Increase binding to |
| | | | FcγRIIIa; enhance ADCC |
| S239D/A330L/I332E | S252D/A349L/I351E | S122D/A213L/I215E | Increase binding to |
| | | | FcγRIIIa; enhance ADCC |
| S298A/E333A/K334A | S317A/E352A/K353A | S181A/E216A/K217A | Increase binding to |
| | | | FcγRIIIa; enhance ADCC |
| F243L/R292P/Y300L/ | F256L/R309P/Y319L/ | F126L/R175P/Y183L/ | Increase binding to |
| V305I/P396L | V324I/P424L | V188I/P279L | FcγRIIIa and FcγRIIa; |
| | | | enhance ADCC |
| L235V/F243L/R292P/ | L248V/F256L/R309P/ | L118V/F126L/R175P/ | Increase binding to |
| Y300L/P396L | Y319L/P424L | Y183L/P279L | FcγRIIIa; enhance ADCC |
| F243L/R292P/Y300L | F256L/R309P/Y319L | F126L/R175P/Y183L | Increase binding to |
| | | | FcγRIIIa; enhance ADCC |
| L234Y/G236W/S298 | L247Y/G249W/S317A | L117Y/G119A/S181A | Increase binding to |
| A (1^{st} heavy chain) | (1^{st} heavy chain) | (1^{st} heavy chain) | FcγRIIIa; enhance ADCC |
| and | and | and | |
| S239D/A330L/I332E | S252D/A349L/I351E | S122D/A213L/I215E | |
| (2^{nd} heavy chain) | (2^{nd} heavy chain) | (2^{nd} heavy chain) | |
| L234Y/L235Q/G236W/ | L247Y/L248Q/G249W/ | L117Y/L118Q/G119W/ | Increase binding to |
| S239M/H268D/D270E/ | S252M/H281D/D283E/ | S122M/H151D/D153E/ | FcγRIIIa; enhance ADCC |
| S298A (1^{st} heavy | S317A (1^{st} | S181A (1^{st} | |
| chain) and | heavy chain) and | heavy chain) and | |
| D270E/K326D/A330M/ | D283E/K345D/A349M/ | D153E/K209D/A213M/ | |
| K334E (2^{nd} heavy | K353E (2^{nd} | K217E (2^{nd} | |
| chain) | heavy chain) | heavy chain) | |
| A327Q/P329A | A346Q/P348A | A210Q/P212A | Increase binding to FcγRI |
| D265A/S267A/H268A/ | D278A/S280A/H281A/ | D148A/S150A/H151A/ | Increase binding to |
| D270A/K326A/S337A | D283A/K345A/S357A | D153A/K345A/S220A | FcγRIIa |
| T256A/K290A/S298A/ | T269A/K307A/S317A/ | T139A/K173A/S181A/ | Increase binding to |
| E333A/K334A | E352A/K353A | E216A/K217A | FcγRIIIa |
| G236A | G249A | G119A | Increase binding to |
| | | | FcγRIIa; enhances ADCP |
| G236A/I332E | G249A/I351E | G119A/I215E | Increase binding to |
| | | | FcγRIIa and FcγRIIIa; |
| | | | enhance ADCC and |
| | | | ADCP |
| G236A/S239D/I332E | G249A/S252D/I351E | G119A/S122D/I215E | Increase binding to FcγRI, |
| | | | FcγRIIa and FcγRIIIa; |
| | | | enhance ADCC and ADCP |
| G236A/S239D/A330L/ | G249A/S252D/A349L/ | G119A/S122D/A213L/ | Increase binding to FcγRIIa |
| I332E | I351E | I215E | and FcγRIIIa; enhance |
| | | | ADCC and ADCP |
| Biantennary glycan at | Biantennary glycan at | Biantennary glycan at | Increases binding to |
| N297 | N314 | N180 | FcγRIIIa; enhances ADCC |
| Afucosylated glycan at | Afucosylated glycan | Afucosylated glycan at | Increases binding to |
| N297 | at N314 | N180 | FcγRIIIa; enhances ADCC |
| K326W | K345W | K209W | Increase binding to C1q; |
| | | | enhance CDC |
| K326A | K345A | K209A | Increase binding to C1q; |
| | | | enhance CDC |
| E333A | E352A | E216A | Increase binding to C1q; |
| | | | enhance CDC |
| K326A/E333A | K345A/E352A | K209A/E216A | Increase binding to C1q; |
| | | | enhance CDC and |
| | | | preserve ADCC activity |
| K326W/E333S | K345W/E352S | K209W/E216S | Increase binding to C1q; |
| | | | enhance CDC |
| K326M/E333S | K345M/E352S | K209M/E216S | Increase binding to C1q; |
| | | | enhance CDC and |
| | | | preserve ADCC activity |
| K222W/T223W | K235W/T236W | K105W/T106W | Increase binding to C1q; |
| | | | enhance CDC |
| K222W/T223W/H224W | K235W/T236W/H237W | K105W/T106W/H107W | Increase binding to C1q; |
| | | | enhance CDC |
| D221W/K222W | D234W/K235W | D104W/K105K | Increase binding to C1q; |
| | | | enhance CDC |
| C220D/D221C | C233D/D234C | C103D/D104C | Increase binding to C1q; |
| | | | enhance CDC and |
| | | | preserve ADCC activity |
| C220D/D221C/K222W/ | C233D/D234C/K235W/ | C103D/D104C/K105W/ | Increase binding to C1q; |
| T223W | T236W | T106W | enhance CDC |
| H268F/S324T | H281F/S343T | H151F/S207T | Increase binding to C1q; |
| | | | enhance CDC |
| S267E | S280E | S150E | Increase binding to C1q; |
| | | | enhance CDC |
| H268F | H281F | H151F | Increase binding to C1q; |
| | | | enhance CDC |
| S324T | S343T | S207T | Increase binding to C1q; |
| | | | enhance CDC |
| S267E/H268F/S324T | S280E/H281F/S343T | S150E/H151F/S207T | Increase binding to C1q; |
| | | | enhance CDC |
| G236A/I332E/S267E/ | G249A/I351E/S280E/ | G119A/I215E/S150E/ | Increase binding to C1q; |
| H268F/S324T | H281F/S343T | H151F/S207T | enhance CDC |
| E345R | E366R | E228R | Increase binding to C1q; |
| | | | enhance CDC; IgG1 |
| | | | hexamer formation |
| E345R/E430G/S440Y | E366R/E461G/S471Y | E228R/E313G/S323Y | Increase binding to C1q; |
| | | | enhance CDC; IgG1 |
| | | | hexamer formation |

[0784] Therapeutic antibodies also can be engineered to reduce or eliminate immune effector functions. For purposes herein, in some embodiments, it of interest, for example, to reduce or eliminate ADCC activity. Constructs herein that include Fc generally are modified to reduce or eliminate ADCC activity. t is of interest to reduce or eliminate immune effector functions, for example, where: the therapeutic antibodies are antagonistic in order to prevent receptor-ligand interactions and signaling; the antibodies are receptor agonists to crosslink receptors and induce signaling; the antibodies are drug delivery vehicles that deliver a drug to antigen-expressing target cells; and, where the reduction or elimination of effector functions prevents target cell death or unwanted cytokine secretion. Reduced effector function also prevents antibody-drug conjugates from interacting with FcγRs, which reduces off-target cytotoxicity. The importance of reducing or eliminating effector functions became evident following adverse events associated with the administration of the first approved mAb, muromonab, which was designed to prevent T cell activation in transplant patients receiving a donor kidney, lung, or heart. Patients administered with muromonab experienced a dangerous induction of pro-inflammatory cytokines (i.e., a cytokine storm); this was due, in part, to the interaction of muromonab with FcγRs (see, e.g., Wang et al. (2018) Protein Cell 9(1):63-73; and Saunders, K. O. (2019) Front. Immunol. 10:1296).

[0785] There are many known mutations that reduce or eliminate receptor function. For example, replacements L235E and F234A/L235A in human IgG4, and L235E and L234A/L235A (all by EU numbering) in human IgG1 reduce FcγR and C1q binding, and reduce effector functions, such as inflammatory cytokine release. Inflammatory cytokine release from therapeutic antibodies, can result in adverse effects. The replacements S228P/L235E, when introduced into IgG4, also reduce binding to FcγRs; the S228P mutation improves stability of IgG4. The mutations S228P/F234A/L235A in the IgG4 Fc decrease binding to FcγRI, IIa and IIIa, and reduce ADCC and CDC. The triple mutant L234E/L235F/P331S in IgG1 Fc decreases binding to FcγRI, FcγRII, FcγRIII and C1q, and reduces CDC, the mutations L234A/L235A/P329G in the IgG1 Fc eliminate FcγRI, FcγRII, FcγRIII and C1q binding, and reduce ADCP. The mutations L234F/L235E/P331S also reduce binding to FcγRs and C1q, and reduce effector functions of the IgG1 Fc. The mutations G237A and E318A in the IgG1 Fc each decrease binding to FcγRII and reduce ADCP; the mutations D265A and E233P decrease binding to FcγRI, FcγRII and FcγRIII, and decrease ADCC and ADCP, and the mutations G236R/L328R decrease binding to all FcγRs and reduce ADCC. Crystal structure data revealed that conformational changes at residue P329, which packs between two conserved tryptophan residues that occur in all FcγRs, form a “proline sandwich,” can be detrimental to the interaction with FcγRs, and that modifications at residue D270 can negatively impact interactions with C1q (see, e.g., Wang et al. (2018) Protein Cell 9(1):63-73; Saunders, K. O. (2019) Front. Immunol. 10:1296; International Application Publication No. WO 2019/226750).

[0786] Induction of the complement cascade is associated with antibody injection site adverse reactions, and eliminating C1q binding to Fc, which is the initial even in the activation of CDC. Modification of the Fc region to eliminate C1q binding can be used to eliminate CDC in constructs containing Fc regions. Many of the mutations that eliminate FcγR binding also eliminate C1q binding, as shown above. For example, the mutation A330L disrupts C1q binding and reduces CDC, and also eliminates FcγRIIb binding. The mutations D270A, P329A, K322A and P331A also result in reduced C1q binding and reduced CDC activity (see, e.g., Saunders, K. O. (2019) Front. Immunol. 10:1296).

[0787] Glyco-engineering can be used to ablate FcγR and C1q binding. As discussed elsewhere herein, the glycan at residue N297 is a complex biantennary glycan. Modification of this glycan to a high mannose glycan (i.e., high mannose glycosylation) reduces the affinity of IgG1 Fc for C1q and reduces CDC activity. Mutations in the Fc that reduce or eliminate C1q and FcγRI binding also can result in an increase in galactosylation and sialylation of the N297 glycan; such mutations include F241A, V264A and D265A, for example. The mutations N297A, N297Q, N297D and N297G, by EU numbering, remove the glycosylation site at N297 and reduce effector functions, such as CDC and ADCC, by abrogating Fc interactions with C1q and FcγRs, respectively. The combination N297G/D265A almost completely abrogates binding to FcγRs and C1q. An IgG3 Fc lacking glycosylation (the aglycone Fc) has reduced binding to FcγRI and C1q (see, e.g., Wang et al. (2018) Protein Cell 9(1):63-73; Saunders, K. O. (2019) Front. Immunol. 10:1296).

[0788] To reduce or eliminate Fc effector functions, large portions of Fc regions from different subclasses, that lack opposing functions, can be exchanged to generate cross-subclass Fc regions. For example, IgG2 has poor FcγR binding but binds C1q, and IgG4 lacks C1q binding but reacts with FcγRs; thus, combinations of IgG2 and IgG4 CH domains that are devoid of both C1q and FcγR binding, can be constructed. In general, in IgG1/IgG4 chimeras, the hinge and C_{H}i domain is from IgG2, and the CH2 and C_{H}3 domains are from IgG4. Since IgG1 and IgG3 recruit complement more effectively than IgG2 and IgG4, and because IgG2 and IgG4 are limited in their ability to induce ADCC, a cross-subclass approach can reduce effector function. For example, the anti-C5 mAb eculizumab, contains IgG2 residues 118-260 (by EU numbering; corresponding to residues 114-273 by Kabat numbering, and residues 1-139 with reference to SEQ ID NO:422), and IgG4 residues 261-447 (by EU numbering; corresponding to residues 274-478 by Kabat numbering, and residues 141-327 with reference to SEQ ID NO:423), and has limited or undetectable effector function. Similarly, an IgG2 variant (IgG2m4) with the point mutations H268Q/V309L/A330S/P331S from IgG4 (by EU numbering; corresponding to H281Q/V328L/A349S/P350S by Kabat numbering, and H147Q/V188L/A209S/P210S with reference to SEQ ID NO:422) lacks binding to all FcγRs and C1q and exhibits reduced effector functions. A variant (called IgG2a) containing the IgG2 to IgG4 cross-subclass mutations V309L/A330S/P331S (by EU numbering; corresponding to V328L/A349S/P350S by Kabat numbering, and V188L/A209S/P210S with reference to SEQ ID NO:422), and the non-germline mutations V234A/G237A/P238S/H268A (by EU numbering; corresponding to V247A/G250A/P251S/H281A by Kabat numbering, and V114A/G116A/P117S/H147A with reference to SEQ ID NO:422), eliminates binding to FcγRs and C1q and exhibit undetectable CDC, ADCC and ADCP activities. The IgG1/IgG4 cross-subclass variant IgG1σ, which includes the mutations L234A/L235A/G237A/P238S/H268A/A330S/P331S, lacks binding to FcγRI and IIIa, and has very weak binding to FcγRIIa and IIb at high concentrations of antibody, resulting in reduced ADCC and CDC activities (see, e.g., Wang et al. (2018) Protein Cell 9(1):63-73; Saunders, K. O. (2019) Front. Immunol. 10:1296).

[0789] The two Tables, below, summarize some IgG1 and IgG4 Fc modifications that reduce or eliminate binding to FcγRs and/or C1q, and thus, reduce or eliminate immune effector functions, including ADCC, ADCP and CDC, which can be introduced into the Fc regions in constructs herein. The tables provide the corresponding modifications by Kabat numbering and by sequential numbering, with reference to the sequence of the IgG1 heavy chain constant domain set forth in SEQ ID NO:421, or the IgG4 heavy chain constant domain set forth in SEQ ID NO:423. Any one or more of these modifications, alone or in various combinations, can be introduced into the IgG1 Fc portions of the constructs provided herein. Other modifications, known in the art to reduce or eliminate immune effector functions, also are contemplated for use herein. Exemplary modifications are shown in Tables 11-13.

TABLE 12
IgG1 Fc Modifications that Reduce or Eliminate Immune Effector Functions

| | | Modifications by | |
|---|---|---|---|
| Modifications by | Modifications by | sequential Numbering | |
| EU Numbering | Kabat Numbering | (SEQ ID NO: 421) | Effects |
| L235E | L248E | L118E | Reduces FcγR binding; reduces ADCC |
| L234A/L235A | L247A/L248A | L117A/L118A | Reduce FcγR and C1q binding; reduced |
| | | | ADCC, ADCP and CDC |
| L234E/L235F/P331S | L247E/L248F/P350S | L117E/L118F/P214S | Reduce FcγR and C1q binding; reduce |
| | | | CDC |
| L234F/L235E/P331S | L247F/L248E/P350S | L117F/L118E/P214S | Reduce FcγR and C1q binding; reduce |
| | | | effector functions |
| L234A/L235A/P329G | L247A/L248A/P348G | L117A/L118A/P212G | Eliminate FcγR and C1q binding; |
| | | | reduce ADCP and CDC |
| L234A/L235A/G237A/ | L247A/L248A/G250A/ | L117A/L118A/G120A/ | Reduced binding to FcγR1, IIa, IIb and |
| P238S/H268A/A330S/ | P251S/H281A/A349S/ | P121S/H151A/A213S/ | IIIa; reduced ADCC and CDC |
| P331S | P350S | P214S | |
| G236R/L328R | G249R/L347R | G119R/L211R | Reduced binding to FcγRs; reduced |
| | | | ADCC |
| G237A | G250A | G120A | Reduces binding to FcγRII; reduced |
| | | | ADCP |
| E318A | E337A | E201A | Reduces binding to FcγRII; reduced |
| | | | ADCP |
| D265A | D278A | D148A | Reduces binding to FcγRI, II, III; |
| | | | reduced ADCC and ADCP |
| E233P | E246P | E116P | Reduces binding to FcγRI, II, III; |
| | | | reduced ADCC and ADCP |
| N297A | N314A | N180A | Remove glycosylation site; decrease |
| | | | interaction with FcγRs; reduce effector |
| | | | functions (CDC, ADCC, ADCP) |
| N297Q | N314Q | N180Q | Remove glycosylation site; decrease |
| | | | interaction with FcγRs; reduce effector |
| | | | functions (CDC, ADCC, ADCP) |
| N297D | N314D | N180D | Remove glycosylation site; decrease |
| | | | interaction with FcγRs; reduce effector |
| | | | functions (CDC, ADCC, ADCP) |
| N297G | N314G | N180G | Remove glycosylation site; decrease |
| | | | interaction with FcγRs; reduce effector |
| | | | functions (CDC, ADCC, ADCP) |
| N297G/D265A | N314G/D278A | N180G/D148A | Reduces binding to FcγRs and C1q; |
| | | | reduces effector functions |
| A330L | A349L | A213L | Reduced C1q binding; reduced CDC |
| D270A | D283A | D153A | Reduced C1q binding; reduced CDC |
| P329A | P348A | P212A | Reduced C1q binding; reduced CDC |
| P331A | P350A | P214A | Reduced C1q binding; reduced CDC |
| K322A | K341A | K205A | Reduced C1q binding; reduced CDC |
| V264A | V277A | V147A | Reduced C1q binding; reduced CDC |
| F241A | F254A | F124A | Reduced C1q binding; reduced CDC |

TABLE 13
IgG4 Fc Modifications that Reduce or Eliminate Immune Effector Functions

| | | Modifications by | |
|---|---|---|---|
| Modifications by | Modifications by | Sequential Numbering | |
| EU Numbering | Kabat Numbering | (SEQ ID NO: 423) | Effects |
| L235E | L248E | L115E | Reduces FcγR binding; reduces ADCC |
| F234A/L235A | F247A/L248A | F114A/L115A | Reduce FcγR and C1q binding; reduced |
| | | | ADCC, ADCP and CDC |
| S228P/L235E | S241P/L248E | S108P/L115E | Reduce FcγR binding; reduced effector |
| | | | functions |
| S228P/F234A/L235A | S241P/F247A/L248A | S108P/F114A/L115A | Reduced binding to FcγRI, IIa and IIIa; |
| | | | reduced ADCC and CDC |

i. Other Modifications of Fc Portions

[0790] The Fe portion also can be modified to increase binding to inhibitory FcγRs, which results in the suppression of the immune response. Therapeutic antibodies with immunosuppressive Fc modifications are advantageous for the treatment of inflammatory diseases. These mutations can be incorporated into the Fc portions of constructs herein that are intended for treatment of diseases and conditions with an inflammatory component or etiology or involvement. For example, the immunosuppressive version of an anti-CD19 antibody (XmAb5871; Xencor), containing the mutations S267E/L328F (by EU numbering), binds inhibitory FcγRIIb with ˜430-fold increased affinity, and depletes CD19+B-cells in patients with systemic lupus erythematosus (SLE). The same mutations, when introduced into a humanized anti-IgE antibody (XmAb7195; Xencor), prevent the binding of IgE to its high-affinity receptor (FcεRI) that is present on basophils and mast cells, increases affinity for FcγRIIb by ˜430-fold, and is used for the treatment of allergies, including allergic asthma. The anti-CD3 antibody TRX4 (Tolerx), containing the aglycosylating Fc mutation N297A (by EU numbering), suppresses pathogenic T-cells and restores normal Treg cell activity in type-1 diabetes (autoimmune) patients (see, e.g., Saxena et al. (2016) Front. Immunol. 7:580).

[0791] An additional example is the monomeric IgG1 Fc (mFc), containing the mutations L351S/T366R/L368H/P395K (by EU numbering), which binds FcRn and exhibits similar in vivo half-life to dimeric Fc, and selectively binds FcγRI with high affinity, but does not bind FcγRIIIa, abrogating Fc-mediated cytotoxicity, including ADCC and CDC. FcγRI is expressed on inflammation-related cells, such as inflammatory macrophages. Targeting this receptor can be used for the treatment of chronic inflammatory diseases, such as arthritis, multiple sclerosis, and cancer. The variant mFc, when fused to the Pseudomonas exotoxin A fragment (PE38), kills FcγRI⁺ macrophage-like U937 cells. Neither the variant mFc, nor the fusion protein, exhibits any cytotoxicity (ADCC or CDC) in vitro (see, e.g., Ying et al. (2014) mAbs 6(5):1201-1210).

[0792] Modifications that increase binding to, or that confer selective binding to, inhibitory FcγRIIb, and/or FcγRI but not FcγRIIIa, can be engineered into the IgG Fc regions in the TNFR1 antagonists and TNFR1 antagonist/TNFR2 agonist constructs provided herein. These modifications include, but are not limited to, one or more of S267E, N297A, L328F, L351S, T366R, L368H, P395K, S267E/L328F, L351S/T366R/L368H/P395K, and combinations thereof, by EU numbering. Table 11, below, shows the corresponding replacements by Kabat numbering, and by sequential numbering, with reference to the sequence of the IgG heavy chain constant domain set forth in SEQ ID NO:421.

TABLE 11
IgG1 Fc Modifications that Increase Binding to Inhibitory FcγRIIb

| | | Modifications by |
|---|---|---|
| Modifications by | Modifications by | sequential Numbering |
| EU Numbering | Kabat Numbering | (SEQ ID NO: 421) |
| S267E | S280E | S150E |
| N297A | N314A | N180A |
| L328F | L347F | L211F |
| L351S | L372S | L234S |
| T366R | T389R | T249R |
| L368H | L391H | L251H |
| P395K | P423K | P278K |
| S267E/L328F | S280E/L347F | S150E/L211F |
| L351S/T366R/L368H/P395K | L372S/T389R/L391H/P423K | L234S/T249R/L251H/P278K |

### G. COMPOSITIONS AND CELLS/CELL LINES CONTAINING OLIGOCLONAL ANTIBODIES (GROWTH FACTOR TRAP MIXTURES), THERAPEUTIC USES AND METHODS OF TREATMENT

[0793] Provided are nucleic acid molecules encoding the chimeric fusion polypeptides (i.e., ECD/Fc) and growth factor trap constructs, vectors containing the nucleic acid molecules. Also provided are cells containing a vector as described herein, and pharmaceutical compositions containing any of the growth factor trap constructs, encoding nucleic acid molecules, vectors, or cells, described herein. The growth factor trap constructs herein are produced and purified as described previously, for example, in Sarup et al. (2008) Mol. Cancer Ther. 7(10):3223-3236; Gompels et al. (2011) Arthritis Research & Therapy 13:R161; Jin et al. (2009) Mol. Med. 15(1-2):11-20; and U.S. Patent Publication No. 2010/0055093.

[0794] A multi-specific, including bi-specific, growth factor trap construct herein contains two or more, particularly two, chimeric proteins created by linking two or more, particularly two, of the same or different ECD polypeptides directly or indirectly to a multimerization domain. In some examples, where the multimerization domain is a polypeptide, such as an immunoglobulin Fc, a gene fusion encoding the ECD-multimerization domain chimeric polypeptide is inserted into an appropriate expression vector. The resulting ECD-multimerization domain chimeric proteins can be expressed in host cells, particularly mammalian cells (e.g., HEK293T or CHO cells, or any other suitable mammalian cells described herein or known in the art), that are transformed with the recombinant expression vector(s), and allowed to assemble into multimers, such as dimers, where the multimerization domains interact to form multivalent polypeptides. The resulting chimeric polypeptides, and multimers formed therefrom, can be purified by any suitable method known in the art, such as, for example, by affinity chromatography over Protein A or Protein G columns. Additionally or alternatively, other techniques for protein purification can be used, including, for example, gel electrophoresis, dialysis, ion-exchange chromatography, ethanol precipitation, HPLC, such as, but not limited to, reverse phase HPLC, chromatography on silica, chromatography on heparin Sepharose® gel, chromato-focusing, SDS-PAGE, and ammonium sulfate precipitation. Where two nucleic acid molecules encoding different ECD chimeric polypeptides are transformed into cells (e.g., HER1/Fc and HER3/Fc), the formation of homodimers and heterodimers will occur. Conditions for expression can be adjusted, such that heterodimer formation is favored over homodimer formation. For example, the ratios of the nucleic acid molecules encoding the different ECD chimeric polypeptides can be adjusted, such that an excess of one nucleic acid molecule results in the formation of less homodimers.

[0795] ECD chimeric polypeptides containing Fc regions also can be engineered to include a tag with metal chelates or other epitope, such as, for example, a 6×His tag, a c-myc tag, a FLAG tag, maltose binding protein (MBP), glutathione-S-transferase (GST), or thioredoxin (TRX). The tagged domain can be used for rapid purification by metal-chelate chromatography, and/or by antibodies, and to allow for detection in Western blots, immunoprecipitation, or activity depletion/blocking in bioassays.

### 1. Pharmaceutical Compositions

[0796] Provided herein are pharmaceutical compositions containing mixtures of the multi-specific, such as a bi-specific, such as mixtures of homomultimers and heteromultimers, growth factor trap constructs provided herein, or encoding nucleic acid molecule(s). Also provided are pharmaceutical compositions containing an isolated cell that contains a nucleic acid molecule or a vector encoding the mixture of multi-specific growth factor constructs, such as mixtures of heteromultimers and homomultimers. Such compositions contain a therapeutically effective amount of the growth factor trap construct mixture. The pharmaceutical compositions can be formulated in any conventional manner, by mixing a selected amount of the growth factor trap construct mixture with one or more physiologically acceptable carriers or excipients. The pharmaceutical composition can be used for therapeutic, prophylactic, and/or diagnostic applications. The concentration of the constructs in the composition will depend on a variety of factors known to those of skill in the art, including, but not limited to, the disease, disorder, or condition, such as the type of cancer treated, the particular constructs, the absorption, inactivation, and excretion rates of the construct, the dosage schedule, the subject treated, and the amount administered, as well as other factors known to those of skill in the art.

[0797] Pharmaceutical carriers or vehicles suitable for administration of the constructs provided herein include any such carriers known to those skilled in the art to be suitable for the particular mode of administration. Selection of the carrier or excipient is within the skill of the administering professional, and can depend upon a number of parameters. These include, for example, the mode of administration (i.e., systemic, oral, nasal, pulmonary, local, topical, or any other mode), and the disorder treated. Pharmaceutical compositions that include a therapeutically effective amount of a multi-specific, such as a bi-specific, growth factor trap construct mixture, also can be provided as a lyophilized powder that is reconstituted, such as with sterile water, immediately prior to administration.

[0798] The pharmaceutical compositions provided herein can be in various forms, e.g., in solid, semi-solid, liquid, powder, aqueous, or lyophilized form. The pharmaceutical compositions provided herein can be formulated for single dosage (direct) administration, or for dilution, or other modification. The concentrations of the compounds in the formulations are effective for delivery of an amount, upon administration, that is effective for the intended treatment. Typically, the compositions are formulated for single dosage administration. The compound can be suspended in micronized or other suitable form, or can be derivatized to produce a more soluble active product. The form of the resulting mixture depends upon a number of factors, including the intended mode of administration, and the solubility of the compound in the selected carrier or vehicle. The effective concentration is sufficient for ameliorating the targeted condition and can be empirically determined. To formulate a composition, the weight fraction of compound is dissolved, suspended, dispersed, or otherwise mixed in a selected vehicle, at an effective concentration, such that the targeted condition is relieved or ameliorated.

[0799] Methods for the production of nucleic acids encoding the growth factor trap constructs provided herein include the methods described in Section H. Section H also describes vectors and cells that can be used, as well as methods for protein expression and purification. The compositions, formulations, dosages, and administration methods described in Section I can be adapted for the production of compositions and formulations including the growth factor trap constructs and encoding nucleic acid molecules described herein. The dosages and administration methods can be determined by the administering professional, and are known in the art and described elsewhere herein.

### 2. Therapeutic Uses and Methods of Treatment

[0800] The pharmaceutical compositions containing multi-specific, including bi-specific, growth factor trap constructs mixtures provided herein can be used for any purpose known to the skilled artisan for use of such molecules. For example, the growth factor trap constructs provided herein can be used for one or more of therapeutic, diagnostic, industrial and/or research purpose(s). In particular, the multi-specific growth factor trap constructs provided herein can be used in the treatment of a variety of diseases and conditions involving CSRs, including RTKs, and, in particular, the HER family of proteins, including those described herein. HER signaling is involved in the etiology of a variety of diseases and disorders, and any such disease or disorder thereof is contemplated for treatment by a growth factor trap construct provided herein.

[0801] The growth factor trap constructs and the encoding nucleic acid molecules, as well as the pharmaceutical compositions, provided herein, can be used for the treatment of any condition for which anti-HER therapies (e.g., trastuzumab, cetuximab, gefitinib, erlotinib, and lapatinib, and others described herein and/or known in the art), are employed, including, but not limited to, cancer and other proliferative diseases and disorders, angiogenesis-related diseases and disorders, rheumatoid arthritis and other chronic inflammatory and autoimmune diseases and disorders, as well as neurodegenerative diseases and disorders of the central nervous system (CNS). For example, treatments using the growth factor trap constructs provided herein, include, but are not limited to, treatment of angiogenesis-related diseases and conditions, inflammatory diseases and conditions, autoimmune diseases and conditions, neurodegenerative diseases, and conditions associated with cell proliferation. Such diseases and conditions include, for example, ocular diseases, atherosclerosis, vascular injuries, Alzheimer's disease, cancers, smooth muscle cell-associated conditions, rheumatoid arthritis (RA), and various autoimmune diseases.

[0802] Dosage levels and regimens can be determined based upon known dosages and regimens, and, if necessary, can be extrapolated based upon the changes in properties of the polypeptides and constructs provided herein, and/or can be determined empirically based on a variety of factors. Such factors include, for example, the body weight of the individual, as well as their general health, age, sex, and diet, and the activity of the specific compound employed, the time of administration, the rate of excretion, drug combinations, the severity and course of the disease, and the patient's disposition to the disease and the judgment of the treating physician. The active ingredient typically is combined with a pharmaceutically effective carrier. The amount of active ingredient that can be combined with the carrier materials to produce a single dosage form or multi-dosage form can vary depending upon the host treated and the particular mode of administration.

[0803] Dosage depends upon the particular disorder, disease or condition that is treated, as well as the particular subject. Typical doses are similar to those of known anti-HER therapies, such as antibodies, including trastuzumab, cetuximab, pertuzumab, and panitumumab, and small molecule tyrosine kinase inhibitors, such gefitinib, erlotinib, and lapatinib. Exemplary doses, for a subject, including humans and other animals, range from about or 0.1 to 100 mg/kg, such as 1 mg/kg to about or 30 mg/kg, such as 5 mg/kg to 25 mg/kg. Dose can be determined based on the assumption that an average human has a mass of about 75 kg. Doses can be adjusted for children, infants, and smaller adults.

[0804] Upon improvement of a patient's condition, a maintenance dose of a compound or composition can be administered, if necessary; and the dosage, the dosage form, or frequency of administration, or a combination thereof, can be modified. In some cases, a subject can require intermittent treatment on a long-term basis upon any recurrence of disease symptoms, or based upon scheduled dosages.

[0805] Treatment of diseases and conditions with the multi-specific growth factor trap constructs provided herein can be effected by any suitable route of administration, using suitable formulations as described herein, including, but not limited to, infusion, subcutaneous injection, and inhalation, or intramuscular, intradermal, oral, topical, and transdermal administration.

[0806] Provided herein is a method of treatment of a HER-mediated or HER-associated disease or condition, including testing a subject with the disease to identify which HER receptors are expressed or overexpressed, and, based on the results, selecting a multi-specific growth factor trap construct that targets at least one, typically two, of the HER receptors. In one embodiment, the disease is a cancer. Exemplary of cancers for treatment herein include gliomas, as well as pancreatic, gastric, head and neck, cervical, lung, colorectal, endometrial, prostate, esophageal, ovarian, uterine, bladder or breast cancers. Cancers treatable with the growth factor (HER ligand) trap constructs herein are generally cancers expressing at least one HER receptor, typically more than one HER receptor. Such cancers can be identified by any means known in the art for detecting HER expression. For example, HER2 expression can be assessed using a commercially available diagnostic/prognostic assay, such as HercepTest™ (Dako). Paraffin embedded tissue sections from a tumor biopsy are subjected to the immunohistochemistry (IHC) assay and accorded a HER2 protein staining intensity criteria. Tumors accorded with less than a threshold score are characterized as not overexpressing HER2, whereas those tumors with greater than, or equal to, a threshold score, are characterized as overexpressing HER2. In one example of treatment, HER2-overexpressing tumors are assessed as candidates for treatment with a multi-specific growth factor trap construct, such as any provided herein.

[0807] In another embodiment, the HER-mediated or HER-associated disease or condition is an inflammatory or autoimmune disorder, particularly rheumatoid arthritis. An animal model of arthritis, such as the collagen-induced arthritis (CIA) mouse model, can be used to test the growth factor trap constructs provided herein. For example, mice treated with a growth factor trap construct herein, such as by local injection of protein, can be observed for reduction of arthritic symptoms, including paw swelling, erythema and ankylosis. Reduction in synovial angiogenesis and synovial inflammation also can be observed.

[0808] The multi-specific, including bi-specific, growth factor trap constructs, encoding nucleic acid molecules and pharmaceutical compositions provided herein, can be used in the treatment of HER (ErbB)-related diseases or HER receptor-mediated diseases, which are any diseases, conditions, or disorders in which a HER receptor and/or ligand is implicated in some aspect of the etiology, pathology, or development thereof. HER-related diseases for treatment include cancers, such as, for example, glioma, or pancreatic, gastric, head and neck, cervical, lung, colorectal, endometrial, prostate, esophageal, ovarian, uterine, bladder, renal, or breast cancers. Other diseases that can be treated include non-cancer proliferative diseases, such as, for example, those that involve proliferation and/or migration of smooth muscle cells, inflammatory or autoimmune diseases, skin disorders, and ophthalmic disorders. Diseases and conditions for treatment include, for example, rheumatoid arthritis, a diabetic retinopathy, a disease of the anterior eye, psoriasis, restenosis, stenosis, atherosclerosis, hypertension from thickening of blood vessels, muscle thickening of the bladder, heart or other muscles, bladder diseases, endometriosis, and obstructive airway diseases, as well as diseases or conditions associated with (e.g., caused by, or aggravated by) exposure to one or more neuregulin (NRG) ligands, such as NRG1 (including type I, II, and III), NRG2, NRG3, and/or NRG4, or other HER family ligands. Examples of NRG-associated diseases, and diseases associated with other HER family ligands, include neurological or neuromuscular diseases, including schizophrenia, Parkinson's disease and Alzheimer's disease, cardiomyopathy, pre-eclampsia, nervous system disease, and heart failure.

[0809] Examples of cancers that can be treated include, but are not limited to, carcinoma, lymphoma, blastoma, sarcoma, and leukemia or lymphoid malignancies, such as, for example, squamous cell cancer (e.g., epithelial squamous cell cancer), lung cancer (including small-cell lung cancer, non-small cell lung cancer, adenocarcinoma of the lung and squamous carcinoma of the lung), cancer of the peritoneum, hepatocellular cancer, gastric cancer (including gastrointestinal cancer), pancreatic cancer, glioblastoma, cervical cancer, ovarian cancer, liver cancer, bladder cancer, hepatoma, breast cancer, colon cancer, rectal cancer, renal cell cancer, esophageal cancer, glioma, colorectal cancer, endometrial cancer, uterine cancer, salivary gland carcinoma, renal cancer, prostate cancer, thyroid cancer, hepatic carcinoma, as well as head and neck cancer.

[0810] The multi-specific growth factor trap constructs provided herein, when administered, generally can result in increased therapeutic efficacy and reduced drug resistance, compared to single-targeted anti-HER therapies, such as trastuzumab, cetuximab, and other antibodies described herein or known in the art, as well as small molecule tyrosine kinase inhibitors, such as gefitinib, erlotinib and lapatinib. As described herein, resistance to single-targeted anti-HER therapies is associated with the co-expression and/or upregulation of other HER family members and the overexpression of their ligands. The HER-ligand binding constructs provided herein, which behave as receptor decoys and sequester multiple HER family ligands, prevent ligand-dependent receptor activation, and downregulate aberrant HER family activity, resulting in the inhibition of multiple ligand-induced HER family members simultaneously. This increases therapeutic efficacy and decreases the chances for development of drug resistance.

[0811] Provided are cell lines that encode mixtures of single chains that target different receptors to produce mixtures of homodimers and heterodimers provided herein. Included are cell lines that encode variants, such as the HER1 oECD/Fc and HER3 oECD/Fc, mixtures exemplified herein. In particular, provided herein are cell lines that encode chains 1 and 2 described in Example 25. The cell lines can include nucleic acid constructs and/or plasmids that encode each chain, such as the single HER1 oECD chain with Fc, and HER3 oECD with the Fc, where, the FC includes mutations, such as the LS and/or YTE mutations (see description and results in the Examples, and SEQ ID NOs: 656-671).

### H. METHODS OF PRODUCING NUCLEIC ACID ENCODING CHIMERIC ECD POLYPEPTIDE FUSIONS AND PRODUCTION OF THE RESULTING ECD MULTIMERS

[0812] Any suitable method for generating the chimeric polypeptides between ECDs, portions thereof, particularly portions sufficient for ligand binding and/or receptor dimerization, and also alternatively splice portions, and a multimerization domain can be used. Similarly, formation of multimers from the chimeric polypeptides, can be achieved by any method known to those of skill in the art. As noted, the multimers typically include and ECD from at least one HER family member, typically a HER1 or a HER3 or HER4, and a second HER family member and/or an ECD from a CSR, such as IGF1-R, a VEGFR, and FGFR or other receptor involved in tumorigenesis or inflammatory or other disease processes.

[0813] Exemplary methods for generating nucleic acid molecules encoding ECD chimeric polypeptides, including ECD polypeptides linked directly or indirectly, to a multimerization domain described herein, are provided. Such methods include in vitro synthesis methods for nucleic acid molecules such as PCR, synthetic gene construction and in vitro ligation of isolated and/or synthesized nucleic acid fragments. Nucleic acid molecules for CSR, including HER family receptors or other RTKs, can be isolated by cloning methods, including PCR of RNA and DNA isolated from cells and screening of nucleic acid molecule libraries by hybridization and/or expression screening methods.

[0814] ECD polypeptides, or portions thereof, can be generated from nucleic acid molecules encoding ECD polypeptides using in vitro and in vivo synthesis methods. ECD multimers, containing one or more chimeric ECD polypeptide such as, for example, ECD-Fc protein fusions or linkage of ECDs with any other multimerization domain, can be generated following expression in any organism suitable to produce the required amounts and forms of ECD polypeptide multimers needed for administration and treatment. Expression hosts include prokaryotic and eukaryotic organisms such as E. coli, yeast, plants, insect cells, mammalian cells, including human cell lines and transgenic animals. ECD polypeptides or ECD polypeptide multimers also can be isolated from cells and organisms in which they are expressed, including cells and organisms in which ECD polypeptides are produced recombinantly and those in which isoforms are synthesized without recombinant means such as genomically encoded isoforms produced by alternative splicing events.

### 1. Synthetic Genes and Polypeptides

[0815] Nucleic acid molecules encoding ECD polypeptides can be synthesized by methods known to one of skill in the art using synthetic gene synthesis. In such methods, a polypeptide sequence of an ECD is “back-translated” to generate one or more nucleic acid molecules encoding an ECD, or portion thereof. The back-translated nucleic acid molecule is then synthesized as one or more DNA fragments such as by using automated DNA synthesis technology. The fragments are then operatively linked to form a nucleic acid molecule encoding an ECD polypeptide. Chimeric ECD polypeptide can be generated by joining nucleic acid molecules encoding an ECD polypeptide with additional nucleic acid molecules such as any encoding a multimerization domain, or other nucleic acid encoding an epitope or fusion tags, regulatory sequences for regulating transcription and translation, vectors, and other polypeptide-encoding nucleic acid molecules. ECD-encoding nucleic acid molecules also can be operatively linked with other fusion tags or labels such as for tracking, including radiolabels, and fluorescent moieties.

[0816] The process of back translation uses the genetic code to obtain a nucleotide gene sequence for any polypeptide of interest, such as an ECD polypeptide. The genetic code is degenerate, 64 codons specify 20 amino acids and 3 stop codons. Such degeneracy permits flexibility in nucleic acid design and generation, allowing for example, the incorporation of restriction sites to facilitate the linking of nucleic acid fragments and/or the placement of unique identifier sequences within each synthesized fragment. Degeneracy of the genetic code also allows the design of nucleic acid molecules to avoid unwanted nucleotide sequences, including unwanted restriction sites, splicing donor or acceptor sites, or other nucleotide sequences potentially detrimental to efficient translation. Additionally, organisms sometimes favor particular codon usage and/or a defined ratio of GC to AT nucleotides. Thus, degeneracy of the genetic code permits design of nucleic acid molecules tailored for expression in particular organisms or groups of organisms. Additionally, nucleic acid molecules can be designed for different levels of expression based on optimizing (or non-optimizing) of the sequences. Back-translation is performed by selecting codons that encode a polypeptide. Such processes can be performed manually using a table of the genetic code and a polypeptide sequence. Alternatively, computer programs, including publicly available software can be used to generate back-translated nucleic acid sequences.

[0817] To synthesize a back-translated nucleic acid molecule, any method available in the art for nucleic acid synthesis can be used. For example, individual oligonucleotides corresponding to fragments of an ECD-encoding sequence of nucleotides are synthesized by standard automated methods and mixed together in an annealing or hybridization reaction. Such oligonucleotides are synthesized such that annealing results in the self-assembly of the gene from the oligonucleotides using overlapping single-stranded overhangs formed upon duplexing complementary sequences, generally about 100 nucleotides in length. Single nucleotide “nicks” in the duplex DNA are sealed using ligation, for example with bacteriophage T4 DNA ligase. Restriction endonuclease linker sequences can, for example, then be used to insert the synthetic gene into any one of a variety of recombinant DNA vectors suitable for protein expression. In another, similar method, a series of overlapping oligonucleotides are prepared by chemical oligonucleotide synthesis methods. Annealing of these oligonucleotides results in a gapped DNA structure. DNA synthesis catalyzed by enzymes such as DNA polymerase I can be used to fill in these gaps, and ligation is used to seal any nicks in the duplex structure. PCR and/or other DNA amplification techniques can be applied to amplify the formed linear DNA duplex.

[0818] Additional nucleotide sequences can be joined to an ECD-encoding nucleic acid molecule thereby generating an ECD fusion, including linker sequences containing restriction endonuclease sites for the purpose of cloning the synthetic gene into a vector, for example, a protein expression vector or a vector designed for the amplification of the core protein coding DNA sequences. Furthermore, additional nucleotide sequences specifying functional DNA elements can be operatively linked to an ECD-encoding nucleic acid molecule. Examples of such sequences include, but are not limited to, promoter sequences designed to facilitate intracellular protein expression, or precursor sequences designed to facilitate protein secretion. Other examples of nucleotide sequences that can be operatively linked to an ECD-encoding nucleic acid molecule include sequences that facilitate the purification and/or detection of a polypeptide. For example, a fusion tag such as an epitope tag or fluorescent moiety can be fused or linked to an isoform. Additional nucleotide sequences such as sequences specifying protein binding regions also can be linked to ECD-encoding nucleic acid molecules. Such regions include, but are not limited to, sequences to facilitate uptake of an ECD polypeptide into specific target cells, or otherwise enhance the pharmacokinetics of the synthetic gene.

[0819] ECD polypeptides also can be synthesized using automated synthetic polypeptide synthesis. Cloned and/or in silico-generated polypeptide sequences can be synthesized in fragments and then chemically linked. Alternatively, chimeric molecules can be synthesized as a single polypeptide. Such polypeptides then can be used in the assays and treatment administrations described herein.

### 2. Methods of Cloning and Isolating ECD Polypeptides

[0820] ECD-encoding nucleic acid molecules, including ECD fusion-encoding nucleic acid molecules, can be cloned or isolated using any available methods known in the art for cloning and isolating nucleic acid molecules. Such methods include PCR amplification of nucleic acids and screening of libraries, including nucleic acid hybridization screening, antibody-based screening, and activity-based screening.

[0821] Nucleic acid molecules encoding ECD polypeptides also can be isolated using library screening. For example, a nucleic acid library representing expressed RNA transcripts as cDNAs can be screened by hybridization with nucleic acid molecules encoding ECD polypeptides or portions thereof. For example, a nucleic acid sequence encoding a portion of an ECD polypeptide, such as for example, a portion of module 1 of domain IV of a HER family ECD, can be used to screen for domain IV-containing molecules based on hybridization to homologous sequences.

[0822] Expression library screening can be used to isolate nucleic acid molecules encoding an ECD polypeptide. For example, an expression library can be screened with antibodies that recognize a specific ECD or a portion of an ECD. Antibodies can be obtained and/or prepared which specifically bind an ECD polypeptide or a region or peptide contained in an ECD. Antibodies which specifically bind an ECD can be used to screen an expression library containing nucleic acid molecules encoding an ECD, such as an ECD of a HER family receptor. Methods of preparing and isolating antibodies, including polyclonal and monoclonal antibodies and fragments therefrom are well known in the art. Methods of preparing and isolating recombinant and synthetic antibodies also are well known in the art. For example, such antibodies can be constructed using solid phase peptide synthesis or can be produced recombinantly, using nucleotide and amino acid sequence information of the antigen binding sites of antibodies that specifically bind a candidate polypeptide. Antibodies also can be obtained by screening combinatorial libraries containing of variable heavy chains and variable light chains, or of antigen-binding portions thereof. Methods of preparing, isolating, and using polyclonal, monoclonal, and non-natural antibodies are reviewed, for example, in Kontermann and Dubel, eds. (2001) “Antibody Engineering” Springer Verlag; Howard and Bethell, eds. (2001) “Basic Methods in Antibody Production and Characterization” CRC Press; and O'Brien and Aitkin, eds. (2001) “Antibody Phage Display” Humana Press. Such antibodies also can be used to screen for the presence of an ECD polypeptide, for example, to detect the expression of an ECD polypeptide in a cell, tissue, or extract.

[0823] Methods for amplification of nucleic acids can be used to isolate nucleic acid molecules encoding an ECD polypeptide, include for example, polymerase chain reaction (PCR) methods. A nucleic acid containing material can be used as a starting material from which an ECD-encoding nucleic acid molecule can be isolated. For example, DNA and mRNA preparations, cell extracts, tissue extracts, fluid samples (e.g., blood, serum, saliva), samples from healthy and/or diseased subjects can be used in amplification methods. Nucleic acid libraries also can be used as a source of starting material. Primers can be designed to amplify an ECD molecule. For example, primers can be designed based on expressed sequences from which an ECD molecule is generated. Primers can be designed based on back-translation of an ECD amino acid sequence. Nucleic acid molecules generated by amplification can be sequenced and confirmed to encode an ECD.

### 3. Methods of Generating and Cloning ECD Polypeptide Chimeras

[0824] Chimeric proteins are polypeptides that comprise two or more regions derived from different, or heterologous, proteins or peptides. Chimeric proteins can contain several sequences, including a signal peptide sequence, one or more sequences for an ECD of a CSR such as a HER family receptor, or portion thereof, and any other heterologous sequence such as a linker sequence, a multimerization domain sequence (i.e., Fc domain, leucine zipper, or other multimer-forming sequence), and/or sequences for epitope tags or other moieties that facilitate protein purification. For example, an ECD polypeptide can be linked directly to another polypeptide (i.e., another ECD polypeptide or portion thereof and/or a multimerization domain) to form a fusion protein. Alternatively, the proteins can be separated by a distance sufficient to ensure that the protein forms proper secondary and tertiary structures. Suitable linker sequences (1) will adopt a flexible extended conformation, (2) will not exhibit a propensity for developing an ordered secondary structure which could interact with the functional domains of the fusion polypeptide, and (3) will have minimal hydrophobic or charged character which could promote interaction with the functional protein domains. Exemplary linker sequences are discussed above and generally include those containing Gly, Asn, or Ser, or other neutral amino acids including Thr or Ala. Generally, linkage of an ECD portion with a heterologous sequence is by recombinant DNA techniques as described above. Alternatively, the heterologous sequence can be covalently linked to the ECD portion by heterobifunctional crosslinking agents, such as any described herein.

[0825] Generally, an ECD fusion molecule encodes a chimeric polypeptide having all or part of an ECD of a CSR sufficient to bind ligand linked to a heterologous polypeptide that facilitates multimer formation, such as a multimerization domain.

[0826] Additionally, an ECD polypeptide also can be linked, directly or indirectly, to one or more other heterologous sequences. For example, an ECD chimeric polypeptide also can include fusion with a tag polypeptide, which provides an epitope to which an anti-tag antibody can selectively bind. Such epitope tagged forms of ECD polypeptide fusions are useful, as the presence thereof can be detected using a labeled antibody against the tag polypeptide. Also, provision of the epitope tag allows the ECD fusion polypeptide to be readily purified by affinity purification using an anti-tag antibody.

[0827] Chimeric proteins can be prepared using conventional techniques of enzyme cutting and ligation of fragments from desired sequences. For example, desired sequences can be synthesized using an oligonucleotide synthesizer, isolated from the DNA of a parent cell which produces the protein by appropriate restriction enzyme digestion, or obtained from a target source, such as a cell, tissue, vector, or other target source, by PCR of genomic DNA with appropriate primers. In one example, ECD chimeric sequences can be generated by successive rounds of ligating DNA target sequences, amplified by PCR, into a vector at engineered recombination site. For example, a nucleic acid sequence for one or more ECD polypeptides, fusion tag, and/or a multimerization domain sequence can be PCR amplified using primers that hybridize to opposite strands and flank the region of interest in a target DNA. Cells or tissues or other sources known to express a target DNA molecule, or a vector containing a sequence for a target DNA molecule, can be used as a starting product for PCR amplification events. The PCR amplified product can be subcloned into a vector for further recombinant manipulation of a sequence, such as to create a fusion with another nucleic acid sequence already contained within a vector, or for the expression of a target molecule.

[0828] PCR primers used in the PCR amplification also can be engineered to facilitate the operative linkage of nucleic acid sequences. For example, non-template complementary 5′ extension can be added to primers to allow for a variety of post-amplification manipulations of the PCR product without significant effect on the amplification itself. For example, these 5′ extensions can include restriction sites, promoter sequences, restriction enzyme linker sequences, a protease cleavage site sequence, or sequences for epitope tags. In one example, for the purpose of creating a fusion sequence, sequences that can be incorporated into a primer include, for example, a sequence encoding a myc epitope tag or other small epitope tag, such that the amplified PCR product effectively contains a fusion of a nucleic acid sequence of interest with an epitope tag.

[0829] In another example, incorporation of restriction enzyme sites into a primer can facilitate subcloning of the amplification product into a vector that contains a compatible restriction site, such as by providing sticky ends for ligation of a nucleic acid sequence. Subcloning of multiple PCR amplified products into a single vector can be used as a strategy to operatively link or fuse different nucleic acid sequences. Examples of restriction enzyme sites that can be incorporated into a primer sequence can include, but are not limited to, an XhoI restriction site (CTCGAG, SEQ ID NO:267), an NheI restriction site (GCTAGC, SEQ ID NO:268), a NotI restriction site (GCGGCCGC, SEQ ID NO: 269), an EcoRI restriction site (GAATTC, SEQ ID NO:270), an AgeI site (ACCGGT, SEQ ID NO:271) or an XbaI restriction site (TCTAGA, SEQ ID NO:272). Other methods for subcloning of PCR products into vectors include blunt end cloning, TA cloning, ligation independent cloning, and in vivo cloning.

[0830] The creation of an effective restriction enzyme site into a primer requires the digestion of the PCR fragment with a compatible restriction enzyme to expose sticky ends, or for some restriction enzyme sites, blunt ends, for subsequent subcloning. There are several factors to consider in engineering a restriction enzyme site into a primer so that it retains its compatibility for a restriction enzyme. First, the addition of 2-6 extra bases upstream of an engineered restriction site in a PCR primer can greatly increase the efficiency of digestion of the amplification product. Other methods that can be used to improve digestion of a restriction enzyme site by a restriction enzyme include proteinase K treatment to remove any thermostable polymerase that can block the DNA, end-polishing with Klenow or T4 DNA polymerase, and/or the addition of spermidine. An alternative method for improving digestion efficiency of PCR products also can include concatemerization of the fragments after amplification. This is achieved by first treating the cleaned-up PCR product with T4 polynucleotide kinase (if the primers have not already been phosphorylated). The ends may already be blunt if a proofreading thermostable polymerase such as Pfu was used or the amplified PCR product can be treated with T4 DNA polymerase to polish the ends if a non-proofreading enzyme such as Taq is used. The PCR products can be ligated with T4 DNA ligase. This effectively moves the restriction enzyme site away from the end of the fragments and allows for efficient digestion.

[0831] Prior to subcloning of a PCR product containing exposed restriction enzyme sites into a vector, such as for creating a fusion with a sequence of interest, it is sometimes necessary to resolve a digested PCR product from those that remain uncut. In such examples, the addition of fluorescent tags at the 5′ end of a primer can be added prior to PCR. This allows for identification of digested products since those that have been digested successfully will have lost the fluorescent label upon digestion.

[0832] In some instances, the use of amplified PCR products containing restriction sites for subsequent subcloning into a vector for the generation of a fusion sequence can result in the incorporation of restriction enzyme linker sequences in the fusion protein product. Generally, such linker sequences are short and do not impair the function of a polypeptide so long as the sequences are operatively linked.

[0833] The nucleic acid molecule encoding an ECD chimeric polypeptide can be provided in the form of a vector which comprises the nucleic acid molecule. One example of such a vector is a plasmid. Many expression vectors are available and known to those of skill in the art and can be used for expression of an ECD polypeptide, including chimeric ECD polypeptide. The choice of expression vector can be influenced by the choice of host expression system. In general, expression vectors can include transcriptional promoters and optionally enhancers, translational signals, and transcriptional and translational termination signals. Expression vectors that are used for stable transformation typically have a selectable marker which allows selection and maintenance of the transformed cells. In some cases, an origin of replication can be used to amplify the copy number of the vector. In addition, many expression vectors offer either an N-terminal or C-terminal epitope tag adjacent to the multiple cloning site so that any resulting protein expressed from the vector will have an epitope tag inserted in frame with the polypeptide sequence. An exemplary expression vector with an inserted epitope tag is the pcDNA/myc-His mammalian expression vector (Invitrogen, SEQ ID NO:161). Thus, for example, expression of an ECD polypeptide from this vector result in the expression of a polypeptide containing a C-terminal myc-His tag, where the myc-His tag has a sequence of amino acids set forth in SEQ ID NO:162. Thus, any ECD polypeptide, or portion thereof, can be expressed with a myc-His tag. Such exemplary polypeptides that contain a tag are described in the Examples and are designated with a “T”, for example, a HER1-621(T) molecule is a polypeptide containing the full-length of a HER1 ECD followed by a C-terminal myc-His tag. Exemplary sequences of ECD polypeptides provided herein containing an epitope tag sequence are set forth in SEQ ID NO:274 and 275. Any ECD polypeptide, or truncated portion thereof, can be generated by any method known to one of skill in the art that contains an epitope tag such as, but not limited to, a c-myc tag, a His tag, or a c-myc/His tag combination as set forth in SEQ ID NO:162.

### 4. Expression Systems

[0834] DNA encoding a chimeric polypeptide, such as any provided herein, is transfected into a host cell for expression. In some instances where ECD multimeric polypeptides are desired whereby multimerization is mediated by a multimerization domain, then the host cell is transformed with DNA encoding separate chimeric ECD molecules that will make the multimer, with the host cell optimally being selected to be capable of assembling the separate chains of the multimer in the desired fashion. Assembly of the separate monomer polypeptides is facilitated by interaction of each respective multimerization domain, which is the same or complementary between chimeric ECD polypeptides. Where HER family receptor ECDs, or portions thereof, are one or both ECD portions of the multimeric polypeptide, the multimerization domain is selected such that assembly of the monomers orients the dimerization arm of the HER molecule away from the partner multimer molecule. This orientation is referred to as “back-to-back” and ensures that the dimerization arm is accessible for dimerization with a cognate HER on the cell surface.

[0835] ECD polypeptides, including chimeric ECD polypeptides, can be expressed in any organism suitable to produce the required amounts and form of polypeptide needed for administration and treatment. Generally, any cell type that can be engineered to express heterologous DNA and has a secretory pathway is suitable. Expression hosts include prokaryotic and eukaryotic organisms such as E. coli, yeast, plants, insect cells, mammalian cells, including human cell lines and transgenic animals. Expression hosts can differ in their protein production levels as well as the types of post-translational modifications that are present on the expressed proteins. The choice of expression host can be made based on these and other factors, such as regulatory and safety considerations, production costs and the need and methods for purification.

a. Prokaryotic Expression

[0836] Prokaryotes, especially E. coli, provide a system for producing large amounts of proteins such as ECD polypeptides and ECD polypeptide fusions provided herein. Other microbial strains may also be used, such as bacilli, for example Bacillus subtilis, various species of Pseudomonas, or other bacterial strains. Transformation of bacteria, including E. coli, is a simple and rapid technique well known to those of skill in the art. In such prokaryotic systems, plasmid vectors which contain replications sites and control sequences derived from a species compatible with the host are often used. For example, common vectors for E. coli include PBR322, pUC18, pBAD, and their derivatives. Commonly used prokaryotic control sequences, which contain promoters for transcription initiation, optionally with an operator, along with ribosome binding-site sequences, include such commonly used promoters as the beta-lactamase (penicillinase) and lactose (lac) promoter systems, the tryptophan (trp) promoter system, the arabinose promoter, and the lambda-derived P1 promoter and N-gene ribosome binding site. Any available promoter system compatible with prokaryotes, however, can be used. Expression vectors for E. coli can contain inducible promoters, such promoters are useful for inducing high levels of protein expression and for expressing proteins that exhibit some toxicity to the host cells. Examples of inducible promoters include the lac promoter, the trp promoter, the hybrid tac promoter, the T7 and SP6 RNA promoters and the temperature regulated λPL promoter.

[0837] ECD polypeptides can be expressed in the cytoplasmic environment of E. coli. The cytoplasm is a reducing environment and for some molecules, this can result in the formation of insoluble inclusion bodies. Reducing agents such as dithiothreitol and β-mercaptoethanol and denaturants, such as guanidine-HCl and urea can be used to resolubilize the proteins. An alternative approach is the expression of ECD polypeptides, including ECD polypeptide fusions, in the periplasmic space of bacteria which provides an oxidizing environment and chaperonin-like and disulfide isomerases and can lead to the production of soluble protein. In some examples, a precursor or signal sequence for use in bacteria including an OmpA, OmpF, PelB, or other precursor sequence, is fused to the protein to be expressed, such as by replacing an endogenous precursor sequence, which directs the protein to the periplasm. The leader peptide is then removed by signal peptidases inside the periplasm. Examples of periplasmic-targeting precursor or leader sequences include the pelB leader from the pectate lyase gene and the leader derived from the alkaline phosphatase gene. In some cases, periplasmic expression allows leakage of the expressed protein into the culture medium. The secretion of proteins allows quick and simple purification from the culture supernatant. Proteins that are not secreted can be obtained from the periplasm by osmotic lysis. Similar to cytoplasmic expression, in some cases proteins can become insoluble and denaturants and reducing agents can be used to facilitate solubilization and refolding. Temperature of induction and growth also can influence expression levels and solubility, typically temperatures between 25° C. and 37° C. are used. Typically, bacteria produce aglycosylated proteins. Thus, if proteins require glycosylation for function, glycosylation can be added in vitro after purification from host cells.

b. Yeast

[0838] Yeasts such as Saccharomyces cerevisiae, Schizosaccharomyces pombe, Yarrowia lipolytica, Kluyveromyces lactis and Pichia pastoris are well known yeast expression hosts that can be used for production of ECD polypeptides. Yeast can be transformed with episomal replicating vectors or by stable chromosomal integration by homologous recombination. Typically, inducible promoters are used to regulate gene expression. Examples of such promoters include GAL1, GAL7 and GAL5 and metallothionein promoters, such as CUP1, AOX1 or other Pichia or other yeast promoter. Other yeast promoters include promoters for synthesis of glycolytic enzymes, e.g., those for 3-phosphoglycerate kinase, or those from the enolase gene or the Leu2 gene obtained from Yep13. Expression vectors often include a selectable marker such as LEU2, TRP1, HIS3 and URA3 for selection and maintenance of the transformed DNA. An exemplary expression vector system for use in yeast is the POT1 vector systems (see e.g., U.S. Pat. No. 4,931,373), which allows transformed cells to be selected by growth in glucose-containing media. Proteins expressed in yeast are often soluble. Co-expression with chaperonins such as Bip and protein disulfide isomerase can improve expression levels and solubility. Additionally, proteins expressed in yeast can be directed for secretion using secretion signal peptide fusions such as the yeast mating type alpha-factor secretion signal from Saccharomyces cerevisiae and fusions with yeast cell surface proteins such as the Aga2p mating adhesion receptor or the Arxula adeninivorans glucoamylase, or any other heterologous or homologous precursor sequence that promotes the secretion of a polypeptide in yeast. A protease cleavage site such as for example the Kex-2 protease, can be engineered to remove the fused sequences from the expressed polypeptides as they exit the secretion pathway. Yeast also is capable of glycosylation at Asn-X-Ser/Thr motifs.

c. Insect Cells

[0839] Insect cells, particularly using baculovirus expression, are useful for expressing polypeptides such as ECD polypeptides, including ECD polypeptide fusions. Insect cells express high levels of protein and are capable of most of the post-translational modifications used by higher eukaryotes. Baculovirus have a restrictive host range which improves the safety and reduces regulatory concerns of eukaryotic expression. Typical expression vectors use a promoter for high level expression such as the polyhedrin promoter of baculovirus. Commonly used baculovirus systems include the baculoviruses such as Autographa californica nuclear polyhedrosis virus (AcNPV), and the Bombyx mori nuclear polyhedrosis virus (BmNPV) and an insect cell line such as Sf9 derived from Spodoptera frugiperda, Pseudaletia unipuncta (A7S) and Danaus plexippus (DpN1). For high-level expression, the nucleotide sequence of the molecule to be expressed is fused immediately downstream of the polyhedrin initiation codon of the virus. Mammalian secretion signals are accurately processed in insect cells and can be used to secrete the expressed protein into the culture medium. For example, a mammalian tissue plasminogen activator precursor sequence facilitates expression and secretion of proteins by insect cells. In addition, the cell lines Pseudaletia unipuncta (A7S) and Danaus plexippus (DpN1) produce proteins with glycosylation patterns similar to mammalian cell systems.

[0840] An alternative expression system in insect cells is the use of stably transformed cells. Cell lines such as the Schnieder 2 (S2) and Kc cells (Drosophila melanogaster) and C7 cells (Aedes albopictus) can be used for expression. The Drosophila metallothionein promoter can be used to induce high levels of expression in the presence of heavy metal induction with cadmium or copper. Expression vectors are typically maintained by the use of selectable markers such as neomycin and hygromycin.

d. Mammalian Cells

[0841] Mammalian expression systems can be used to express ECD polypeptides, including ECD polypeptide fusions provided herein. Expression constructs can be transferred to mammalian cells by viral infection such as by using an adenovirus vector or by direct DNA transfer such as by conventional transfection methods involving liposomes, calcium phosphate, DEAE-dextran and by physical means such as electroporation and microinjection. Exemplary expression vectors include, for example, pcDNA3.1/myc-His (Invitrogen, SEQ ID NO:161). Expression vectors for mammalian cells typically include an mRNA cap site, a TATA box, a translational initiation sequence (Kozak consensus sequence) and polyadenylation elements. Such vectors often include transcriptional promoter-enhancers for high-level expression, for example the SV40 promoter-enhancer, the human cytomegalovirus (CMV) promoter, such as the hCMV-MIE promoter-enhancer, and the long terminal repeat of Rous sarcoma virus (RSV), or other viral promoters such as those derived from polyoma, adenovirus II, bovine papilloma virus or avian sarcoma viruses. Additional suitable mammalian promoters include β-actin promoter-enhancer and the human metallothionein II promoter. These promoter-enhancers are active in many cell types. Tissue and cell-type promoters and enhancer regions also can be used for expression. Exemplary promoter/enhancer regions include, but are not limited to, those from genes such as elastase I, insulin, immunoglobulin, mouse mammary tumor virus, albumin, alpha fetoprotein, alpha 1 antitrypsin, beta globin, myelin basic protein, myosin light chain 2, and gonadotropic releasing hormone gene control. Selectable markers can be used to select for and maintain cells with the expression construct. Examples of selectable marker genes include, but are not limited to, hygromycin B phosphotransferase, adenosine deaminase, xanthine-guanine phosphoribosyl transferase, aminoglycoside phosphotransferase, dihydrofolate reductase and thymidine kinase. Fusion with cell surface signaling molecules such as TCR-Z and FcεRI-γ can direct expression of the proteins in an active state on the cell surface.

[0842] Many cell lines are available for mammalian expression including mouse, rat human, monkey, chicken, and hamster cells. Exemplary cell lines include but are not limited to CHO, Balb/3T3, HeLa, MT2, mouse NS0 (non-secreting) and other myeloma cell lines, hybridoma and heterohybridoma cell lines, lymphocytes, fibroblasts, Sp2/0, COS, NIH3T3, HEK293, 293T, 293S, 2B8, and HKB cells. Cell lines also are available adapted to serum-free media which facilitates purification of secreted proteins from the cell culture media. One such example is the serum free EBNA-1 cell line (Pham et al., (2003) Biotechnol. Bioeng. 84:332-42.)

e. Plants

[0843] Transgenic plant cells and plants can be used to express ECD polypeptides. Expression constructs are typically transferred to plants using direct DNA transfer such as microprojectile bombardment and PEG-mediated transfer into protoplasts, and with agrobacterium-mediated transformation. Expression vectors can include promoter and enhancer sequences, transcriptional termination elements and translational control elements. Expression vectors and transformation techniques are usually divided between dicot hosts, such as Arabidopsis and tobacco, and monocot hosts, such as corn and rice. Examples of plant promoters used for expression include the cauliflower mosaic virus promoter, the nopaline synthase promoter, the ribose bisphosphate carboxylase promoter, and the ubiquitin and UBQ3 promoters. Selectable markers such as hygromycin, phosphomannose isomerase and neomycin phosphotransferase are often used to facilitate selection and maintenance of transformed cells. Transformed plant cells can be maintained in culture as cells, aggregates (callus tissue) or regenerated into whole plants. Transgenic plant cells also can include algae engineered to produce CSR isoforms (see for example, Mayfield et al. (2003) PNAS 100:438-442). Because plants have different glycosylation patterns than mammalian cells, this can influence the choice of CSR isoforms produced in these hosts.

### 5. Methods of Transfection and Transformation

[0844] Transformation or transfection of host cells is accomplished using standard techniques suitable to the chosen host cells. Methods of transfection are known to one of skill in the art, for example, calcium phosphate and electroporation, as well as the use of commercially available cationic lipid reagents, such as Lipofectamine™ reagent, Lipofectamine™ 2000 reagent, or Lipofectin® reagent (Invitrogen, Carlsbad Calif.), which facilitate transfection. Depending on the host cell used, transformation is performed using standard techniques appropriate to such cells. Calcium treatment, employing calcium chloride for example, or electroporation is generally used for prokaryotes or other cells that contain substantial cell-wall barriers. Infection with Agrobacterium tumefaciens is used for transformation of certain plant cells. For mammalian cells without such cell walls, calcium phosphate precipitation can be employed. General aspects of transformation are described for plant cells (see e.g., Shaw et al., (1983) Gene, 23:315, International Pub. No. WO89/05859), mammalian cells (see e.g., U.S. Pat. No. 4,399,216; Keown et al., Methods in Enzymolog., (1990) 185:527; Mansour et al., (1988) Nature 336:348), or yeast cells (see e.g., Val Solingen et al., (1977) J Bact (1977) 130:946, Hsiao et al., (1979) Proc. Natl. Acad. Sci., 76:3829). Other methods for introducing DNA into a host cell include, but are not limited to, nuclear microinjection, electroporation, bacterial protoplast fusion with intact cells, or using polycations such as polybrene or polyornithine.

### 6. Recovery and Purification of ECD Polypeptides, Chimeric Polypeptides, and the Resulting ECD Multimers

[0845] ECD polypeptides and chimeric ECD polypeptides, including ECD polypeptide multimers, can be isolated using various techniques well-known in the art. One skilled in the art can readily follow known methods for isolating polypeptides and proteins in order to obtain one of the isolated polypeptides or proteins provided herein. These include, but are not limited to, immunochromatography, HPLC, size-exclusion chromatography, and ion-exchange chromatography. Examples of ion-exchange chromatography include anion and cation exchange and include the use of DEAE Sepharose® chromatography exchange medium, DEAE Sephadex® chromatography exchange medium, CM Sepharose® chromatography exchange resin, SP Sepharose® chromatography exchange resin, or any other similar chromatography exchange media and resins and columns known to one of skill in the art. Isolation of an ECD polypeptide or ECD multimer polypeptide from the cell culture media or from a lysed cell can be facilitated using antibodies directed against either an epitope tag in a chimeric ECD polypeptide or against the ECD polypeptide and then isolated via immunoprecipitation methods and separation via SDS-polyacrylamide gel electrophoresis (PAGE). Alternatively, an ECD polypeptide or chimeric ECD polypeptide including ECD multimers can be isolated via binding of a polypeptide-specific antibody to an ECD polypeptide and/or subsequent binding of the antibody to protein-A or protein-G Sepharose® columns, and elution of the protein from the column. The purification of an ECD polypeptide also can include an affinity column or bead immobilized with agents which will bind to the protein, followed by one or more column steps for elution of the protein from the binding agent. Examples of affinity agents include, but are not limited to, Concanavalin A (Con A)-agarose, Heparin-Toyopearl®, or Cibacron Blue 3GA Sepharose® resin. A protein can also be purified by hydrophobic interaction chromatography using, resins and matrices and media known to those of skill in the art, such as phenyl ether, butyl ether, or propyl ether resins.

[0846] In some examples, a chimeric ECD polypeptide can be purified using immunoaffinity chromatography. In such examples, an ECD polypeptide can be expressed as a fusion protein with an epitope tag such as described herein including, but not limited to, maltose binding protein (MBP), glutathione-S-transferase (GST) or thioredoxin (TRX), myc tag and/or a His tag. Kits for expression and purification of such fusion proteins are commercially available from New England BioLab (Beverly, Mass.), Pharmacia (Piscataway, N.J.), Invitrogen, and others. The protein also can be fused to a tag and subsequently purified by using a specific antibody directed to such an epitope. In some examples, an affinity column or bead immobilized with an epitope tag-binding agent can be used to purify an ECD polypeptide fusion. For example, binding agents can include glutathione for interaction with a GST epitope tag, immobilized metal-affinity agents such as Cu2+ or Ni2+ for interaction with a Poly-His tag, anti-epitope antibodies such as an anti-myc antibody, and/or any other agent that can be immobilized to a column or bead for purification of a chimeric ECD protein.

[0847] Where a purified homo- or heteromultimeric molecule is desired containing an Fc domain or a mixture thereof, the molecule can be recovered or purified using methods known to one of skill in the art and as detailed in the Examples. For purposes herein, such purification is shown to not be necessary.

[0848] Where a host cell is co-expressed with nucleic acid encoding a first polypeptide containing an Fc domain, and nucleic acid encoding a second polypeptide also containing an Fc domain, the resulting expressed molecule will form as a homodimers of the first polypeptide, homodimers of the second polypeptide, and heterodimers of the first and second polypeptide, where each dimer is linked via interactions of the Fc multimerization domain. The combinations of the homo- and hetero-dimers can be recovered from the culture medium as a secreted polypeptide, although it also can be recovered from host cell lysate when directly produced without a signal sequence. If the homo- or heteromultimer is membrane bound, it can be released from the membrane using a suitable detergent solution or non-ionic surfactant (e.g., Triton X 100). It is this combination that provides the compositions provided herein.

[0849] Homo- or heterodimers having antibody constant domains or mixtures thereof can be purified from conditioned medium, away from other particulate cell debris or contaminating proteins, by a variety of methods including, but not limited to, hydroxylapatite chromatography, gel electrophoresis, dialysis, or affinity chromatography. Where the multimer has a CH3 domain, the Bakerbond ABX™ resin (J. T. Baker, Phillipsburg, N.J.) is useful for purification. Other techniques for protein purification such as fractionation on an ion-exchange column, ethanol precipitation, reverse phase HPLC, chromatography on silica, chromatography on a resin or matrix, such as Heparin Sepharose®, chromatography on an anion or cation exchange resin (such as a polyaspartic acid column), chromatofocusing, SDS-PAGE, and ammonium sulfate precipitation also are available depending on the polypeptide to be recovered.

[0850] In addition, Protein A or Protein G can be used. The suitability of Protein A as an affinity ligand depends on the species and isotype of the immunoglobulin Fc domain that is used in the chimera. Protein A can be used to purify immunoadhesins that are based on human γ1, γ2, or γ4 heavy chains (Lindmark et al. (1983) J. Immunol. Meth. 62:1-13). Protein G is recommended for all mouse isotypes and for human 73 (Guss et al. (1986) EMBO J. 5:1567-1575). The matrix to which the affinity ligand, such as Protein A or Protein G, or other affinity ligand capable of interacting with the multimeric molecule), is most often agarose, but other matrices are available. Mechanically stable matrices such as controlled pore glass or poly(styrenedivinyl)benzene allow for faster flow rates and shorter processing times than can be achieved with agarose. The conditions for binding an immunoadhesin to the protein A or G affinity column are dictated entirely by the characteristics of the Fc domain; that is, is species and isotype. Generally, when the proper ligand is chosen, efficient binding occurs directly from unconditioned culture fluid. The bound ECD-Fc containing molecule can be eluted at acidic pH (at or above 3.0), or in a neutral pH buffer containing a mildly chaotropic salt. Alternatively, or in addition, the bound molecule can be eluted with excess IgG. If necessary, the eluted molecules can be neutralized at basic pH. The resulting purified molecule contains purified (typically greater than 95%) homo- and heteromultimers.

[0851] Prior to purification, conditioned media containing the secreted ECD polypeptide, including chimeric ECD polypeptide and/or ECD multimers, can be clarified and/or concentrated. Clarification can be by centrifugation followed by filtration. Concentration can be by any method known to one of skill in the art, such as for example, using tangential flow membranes or using stirred cell system filters. Various molecular weight (MW) separation cut offs can be used for the concentration process. For example, a 10,000 MW separation cutoff can be used. The Examples detail various methods of purifying heteromultimers of HER1/HER3 (e.g., Rb200 and Rb200h) as well as purifying mixtures of homomultimers (HER1/HER1 and HER3/HER3) and heteromultimers (HER1/HER3).

[0852] Provided are pharmaceutical compositions and methods of use for treatment, where the pharmaceutical composition comprises a mixture of heteromultimers and homomultimers wherein the heteromultimer comprises an ECD or portion thereof from HER1 and another ECD or portion thereof from HER3 and wherein the homomultimers comprise an ECD or portion thereof from HER1 or an ECD or portion thereof from HER3. The mixture can have the ratio of the three multimer components in any ratio. In some cases, the ratio of the three multimer components is dependent on the type of expression system that is used. In one embodiment, the ratio of the three multimer components are about equal to each other. In others, the ratio varies, and in some embodiments is about 1:6:9, see Example 12 and accompanying figure that show the ratios are reproducible for a particular oligo-trap mixture.

### I. ASSAYS TO ASSESS OR MONITOR ECD MULTIMER ACTIVITIES

[0853] Generally, an ECD multimer modulates biological activities of one or more, typically two or more, cognate CSR or other interacting CSR. In vitro and in vivo assays can be used to monitor a biological activity of an ECD multimer. Exemplary in vitro and in vivo assays are provided herein to assess the biological activity of an RTK ECD multimer, in particular a HER ECD multimer. Many of the assays are applicable to other CSRs ECD multimers. In addition, numerous assays for biological activities of CSRs are known to one of skill in the art, and any assay known to assess the activity of a particular CSR can be chosen depending on the ECD multimer to be tested. Assays to test for the effect of ECD multimers on RTK activity include, but are not limited to, kinase assays, homodimerization and heterodimerization assays, protein:protein interaction assays, structural assays, cell signaling assays and in vivo phenotyping assays. Assays also include the use of animal models, including disease models in which a biological activity can be observed and/or measured. Dose response curves of an ECD multimer in such assays can be used to assess modulation of biological activities and as well as to determine therapeutically effective amounts of an ECD multimer for administration. Exemplary assays are described below.

### 1. Kinase/Phosphorylation Assays

[0854] Kinase activity can be detected and/or measured directly and indirectly. For example, antibodies against phosphotyrosine can be used to detect phosphorylation of an RTK. For example, activation of tyrosine kinase activity of an RTK can be measured in the presence of a ligand for an RTK. Transphosphorylation can be detected by anti-phosphotyrosine antibodies. Transphosphorylation can be measured and/or detected in the presence and absence of an ECD multimer, thus measuring the ability of an ECD multimer to modulate the transphosphorylation of an RTK. Briefly, cells expressing an RTK can be exposed to an ECD multimer and treated with ligand. Cells are lysed and protein extracts (whole cell extracts or fractionated extracts) are loaded onto a polyacrylamide gel, separated by electrophoresis, and transferred to membrane, such as used for western blotting. Immunoprecipitation with anti-RTK antibodies also can be used to fractionate and isolate RTK proteins before performing gel electrophoresis and western blotting. The membranes can be probed with anti-phosphotyrosine antibodies to detect phosphorylation as well as probed with anti-RTK antibodies to detect total RTK protein. Control cells, such as cells not expressing RTK isoform and cells not exposed to ligand can be subjected to the same procedures for comparison.

[0855] Tyrosine phosphorylation also can be measured directly, such as by mass spectroscopy. For example, the effect of an ECD multimer on the phosphorylation state of an RTK can be measured, such as by treating intact cells with various concentrations of an ECD multimer and measuring the effect on activation of an RTK. The RTK can be isolated by immunoprecipitation and trypsinized to produce peptide fragments for analysis by mass spectroscopy. Peptide mass spectroscopy is a well-established method for quantitatively determining the extent of tyrosine phosphorylation for proteins; phosphorylation of tyrosine increases the mass of the peptide ion containing the phosphotyrosine, and this peptide is readily separated from the non-phosphorylated peptide by mass spectroscopy.

[0856] For example, tyrosine-1139 and tyrosine-1248 are known to be autophosphorylated in the HER2 RTK. Trypsinized peptides can be empirically determined or predicted based on polypeptide sequence, for example by using ExPASy-PeptideMass program. The extent of phosphorylation of tyrosine-1139 and tyrosine-1248 can be determined from the mass spectroscopy data of peptides containing these tyrosines. Such assays can be used to assess the extent of auto-phosphorylation of an RTK and the ability of an ECD multimer to modulate transphosphorylate of an RTK.

### 2. Complexation/Dimerization

[0857] Complexation, such as dimerization of RTKs and ECD multimers can be detected and/or measured. For example, isolated polypeptides can be mixed together, subject to gel electrophoresis and western blotting. RTKs and/or ECD multimers also can be added to cells and cell extracts, such as whole cell or fractionated extracts, and can be subject to gel electrophoresis and western blotting. Antibodies recognizing the polypeptides can be used to detect the presence of monomers, dimers, and other complexed forms. Alternatively, labeled RTKs and/or labeled ECD multimers can be detected in the assays. Such assays can be used to compare homodimerization of an RTK or heterodimerization of two or more RTKs in the presence and absence of an ECD multimer. Assays also can be performed to assess the ability of an ECD multimer to dimerize with an RTK. For example, a HER ECD multimer can be assessed for its ability to heterodimerize with HER1, HER2, HER3, and HER4. Additionally, an ECD multimer can be assessed for its ability to modulate the ability of an RTK to homo- or heterodimerize. For example, a HER ECD multimer can be assessed for its ability to modulate the heterodimerization of HER2 with HER1, HER3, or HER4, among other combinations.

[0858] In another example, molecular size exclusion analysis can be performed. Molecular size exclusion is performed with particular size exclusion columns, and eluted molecules compared to a set reference standard. Molecules can be administered alone or can be combined with another molecule. For example, any RTK polypeptide, chimeric polypeptide or ECD multimer can be administered to a size exclusion column. The elution volume can be determined and molecular weights calculated for each of the molecule, such as is described in Example 4. Alternatively, two or more polypeptides can be co-administered and the elution profile assessed to determine if the two or more polypeptides or molecules are capable of forming an oligomeric molecule.

### 3. Ligand Binding

[0859] Generally, RTKs bind one or more ligands. Ligand binding modulates the activity of the receptor and thus modulates, for example, signaling within a signal transduction pathway. Ligand binding to an ECD multimer and ligand binding of an RTK in the presence of an ECD multimer can be measured. For example, labeled ligand such as radiolabeled ligand can be added to purified or partially purified RTK in the presence and absence (control) of an ECD multimer. Immunoprecipitation and measurement of radioactivity can be used to quantify the amount of ligand bound to an RTK in the presence and absence of an ECD multimer. An ECD multimer also can be assessed for ligand binding such as by incubating an ECD multimer with labeled ligand and determining the amount of labeled ligand bound by an ECD multimer, for example, as compared to an amount bound by a wildtype or predominant form of a corresponding RTK.

### 4. Cell Proliferation Assays

[0860] A number of RTKs, for example VEGFR, HER family receptors, and other growth factor receptors are involved in cell proliferation. Effects of an ECD multimer on cell proliferation can be measured. Cells to be tested typically express the target RTK receptor. For example, ligand can be added to cells expressing an RTK. An ECD multimer can be added to such cells before, concurrently or after ligand addition and effects on cell proliferation measured. The level of proliferation of the cells can be assessed by labeling the cells with a dye such as Alamar Blue or Crystal Violet, or other similar dyes, followed by an optimal density measurement. MTT [3-(4,5-dimethylthiazol-2-yl)-2,5-diphenyltetrazolium bromide] also can be used to assess cell proliferation. The use of MTT as a proliferation reagent is based on the ability of a mitochondrial dehydrogenase enzyme from viable cells to cleave the tetrazolium rings of the pale yellow MTT and form a dark blue formazan crystals which accumulates in healthy cells as it is impermeable to cell membranes. Solubilization of cells by the addition of a detergent results in the release and solubilization of the crystals. The color, which is directly proportional to the number of viable, proliferating cells, can be quantified by spectrophotometric means. Thus, after incubation of selected cells with an ECD multimer in the presence or absence of ligand, MTT can be added to the cells, the cells can be solubilized with detergent, and the absorbance read at 570 nm. Alternatively, cells can be pre-labeled with a radioactive label such as 3H-tritium, or other fluorescent label such as CFSE prior to proliferation experiments.

### 5. Cell Disease Model Assays

[0861] Cells from a disease or condition or which can be modulated to mimic a disease or condition can be used to measure/and or detect the effect of an ECD multimer. An ECD multimer is added or expressed in cells and a phenotype is measured or detected in comparison to cells not exposed to or not expressing an ECD multimer. Such assays can be used to measure effects including effects on cell proliferation, metastasis, inflammation, angiogenesis, pathogen infection and bone resorption.

[0862] For example, effects of an ECD multimer can be measured in angiogenesis. For example, tubule formation by endothelial cells such as human umbilical vein endothelial cells (HUVEC) in vitro can be used as an assay to measure angiogenesis and effects on angiogenesis. Addition of varying amounts of an ECD multimer to an in vitro angiogenesis assay is a method suitable for screening the effectiveness of an ECD multimer as a modulator of angiogenesis.

### 6. Animal Models

[0863] Animal models can be used to assess the effect of an ECD multimer. For example, the effects of an ECD multimer on cancer cell proliferation, migration and invasiveness can be measured. In one such assay, cancer cells such as ovarian cancer cells, after culturing in vitro, are trypsinized, suspended in a suitable buffer and injected into mice (e.g., into flanks and shoulders of model mice such as Balb/c nude mice). Mice are co-administered either before, concurrently, or after the administration of cancer cells to the mice by any suitable route of administration (i.e., subcutaneous, intravenous, intraperitoneal, and other routes). Tumor growth is monitored over time. Similar assays can be performed with other cell types and animal models, for example, murine lung carcinoma (LLC) cells and C57BL/6 mice and SCID mice. Tumor growth can be compared to mice not administered with an ECD multimer, or to mice who are deficient in the respective cognate receptor or interacting receptor of the ECD multimer.

[0864] In another example, effects of ECD multimers on ocular disorders can be assessed using assays such as a corneal micropocket assay. Briefly, mice are administered with an ECD multimer (or control) by injection 2-3 days before the assay. Subsequently, the mice are anesthetized, and pellets of a ligand such as VEGF or other growth factor ligand are implanted into the corneal micropocket of the eyes. Neovascularization is then measured, for example, 5 days following implantation. The effect of an ECD multimer on angiogenesis as compared to a control is then assessed.

[0865] Any animal models known in the art can be used to assess the effect of a ECD multimer such as a HER multimer, including transgenic mice, such as humanized transgenic mouse models such as atherosclerosis mice expressing DR and DQ major histocompatibility complex II molecules, which can be used as a model for example, for autoimmune diseases, including rheumatoid arthritis, celiac disease, multiple sclerosis, and insulin-dependent diabetes mellitus (Gregersen et al. (2004) Tissue Antigens 63(5):383-94), Apolipoprotein-E deficient mice (ApoE^{-/-}), which can be used as a model for atherosclerosis, IL-10 knockout mice, which can be used as a model, for example, for inflammatory bowel disease and Crohn's disease (Scheinin et al. (2003) Clin. Exp. Immunol. 133(1):38-43), and Alzheimer's disease models such as transgenic mice overexpressing mutant amyloid precursor protein and mice expressing familial autosomal dominant-linked PS1. Animal models also include animals induced or treated to exhibit disease such as EAE induced animals used as a model for multiple sclerosis.

### J. PREPARATION, FORMULATION AND ADMINISTRATION OF ECD MULTIMERS AND ECD MULTIMER COMPOSITIONS

[0866] ECD multimers and ECD multimer compositions, including HER ECD multimers and HER ECD multimer compositions, can be formulated for administration by any route known to those of skill in the art including intramuscular, intravenous, intradermal, intraperitoneal injection, subcutaneous, epidural, nasal, oral, rectal, topical, inhalational, buccal (e.g., sublingual), and transdermal administration or any route. ECD multimers can be administered by any convenient route, for example by infusion or bolus injection, by absorption through epithelial or mucocutaneous linings (e.g., oral mucosa, rectal and intestinal mucosa, etc.) and can be administered with other biologically active agents, either sequentially, intermittently or in the same composition. Administration can be local, topical, or systemic depending upon the locus of treatment. Local administration to an area in need of treatment can be achieved by, for example, but not limited to, local infusion during surgery, topical application, e.g., in conjunction with a wound dressing after surgery, by injection, by means of a catheter, by means of a suppository, or by means of an implant. Administration also can include controlled release systems including controlled release formulations and device-controlled release, such as by means of a pump. The most suitable route, which can be determined by a skilled artisan, in any given case depends on parameters and factors, such as the nature and severity of the disease or condition being treated and on the nature of the particular composition which is used.

[0867] Various delivery systems are known and can be used to administer ECD multimers, such as but not limited to, encapsulation in liposomes, microparticles, microcapsules, recombinant cells capable of expressing the compound, receptor mediated endocytosis, and delivery of nucleic acid molecules encoding ECD multimers such as retrovirus delivery systems.

[0868] Pharmaceutical compositions containing ECD multimers can be prepared. Generally, pharmaceutically acceptable compositions are prepared in view of approvals for a regulatory agency or otherwise prepared in accordance with generally recognized pharmacopoeia for use in animals and in humans. Pharmaceutical compositions can include carriers such as a diluent, adjuvant, excipient, or vehicle with which an ECD multimer is administered. Such pharmaceutical carriers can be sterile liquids, such as water and oils, including those of petroleum, animal, vegetable, or synthetic origin, such as peanut oil, soybean oil, mineral oil, and sesame oil. Water is a typical carrier when the pharmaceutical composition is administered intravenously. Saline solutions and aqueous dextrose and glycerol solutions also can be employed as liquid carriers, particularly for injectable solutions. Compositions can contain along with an active ingredient: a diluent such as lactose, sucrose, dicalcium phosphate, or carboxymethylcellulose; a lubricant, such as magnesium stearate, calcium stearate and talc; and a binder such as starch, natural gums, such as gum acacia gelatin, glucose, molasses, polyvinylpyrrolidone, celluloses and derivatives thereof, povidone, crospovidones and other such binders known to those of skill in the art. Suitable pharmaceutical excipients include starch, glucose, lactose, sucrose, gelatin, malt, rice, flour, chalk, silica gel, sodium stearate, glycerol monostearate, talc, sodium chloride, dried skim milk, glycerol, propylene, glycol, water, and ethanol. A composition, if desired, also can contain minor amounts of wetting or emulsifying agents, or pH buffering agents, for example, acetate, sodium citrate, cyclodextrin derivatives, sorbitan monolaurate, triethanolamine sodium acetate, triethanolamine oleate, and other such agents. These compositions can take the form of solutions, suspensions, emulsion, tablets, pills, capsules, powders, and sustained release formulations. A composition can be formulated as a suppository, with traditional binders and carriers such as triglycerides. Oral formulation can include standard carriers such as pharmaceutical grades of mannitol, lactose, starch, magnesium stearate, sodium saccharine, cellulose, magnesium carbonate, and other such agents. Examples of suitable pharmaceutical carriers are described in “Remington's Pharmaceutical Sciences” by E. W. Martin. Such compositions will contain a therapeutically effective amount of the compound, generally in purified form, together with a suitable amount of carrier so as to provide the form for proper administration to the patient. The formulation should suit the mode of administration.

[0869] Formulations are provided for administration to humans and animals in unit dosage forms, such as tablets, capsules, pills, powders, granules, sterile parenteral solutions or suspensions, and oral solutions or suspensions, and oil:water emulsions containing suitable quantities of the compounds or pharmaceutically acceptable derivatives thereof. Pharmaceutically therapeutically active compounds and derivatives thereof are typically formulated and administered in unit dosage forms or multiple dosage forms. Unit dose forms as used herein refer to physically discrete units suitable for human and animal subjects and packaged individually as is known in the art. Each unit dose contains a predetermined quantity of a therapeutically active compound sufficient to produce the desired therapeutic effect, in association with the required pharmaceutical carrier, vehicle or diluent. Examples of unit dose forms include ampoules and syringes and individually packaged tablets or capsules. Unit dose forms can be administered in fractions or multiples thereof. A multiple dose form is a plurality of identical unit dosage forms packaged in a single container to be administered in segregated unit dose form. Examples of multiple dose forms include vials, bottles of tablets or capsules or bottles of pints or gallons. Hence, multiple dose form is a multiple of unit doses that are not segregated in packaging.

[0870] Dosage forms or compositions containing active ingredients in the range of 0.005% to 100% with the balance made up from a nontoxic carrier can be prepared. For oral administration, pharmaceutical compositions can take the form of, for example, tablets or capsules prepared by conventional means with pharmaceutically acceptable excipients such as binding agents (e.g., pregelatinized maize starch, polyvinyl pyrrolidone or hydroxypropyl methylcellulose); fillers (e.g., lactose, microcrystalline cellulose or calcium hydrogen phosphate); lubricants (e.g., magnesium stearate, talc or silica); disintegrants (e.g., potato starch or sodium starch glycolate); or wetting agents (e.g., sodium lauryl sulphate). The tablets can be coated by methods well-known in the art.

[0871] Pharmaceutical preparation also can be in liquid form, for example, solutions, syrups, or suspensions, or can be presented as a drug product for reconstitution with water or other suitable vehicle before use. Such liquid preparations can be prepared by conventional means with pharmaceutically acceptable additives such as suspending agents (e.g., sorbitol syrup, cellulose derivatives or hydrogenated edible fats); emulsifying agents (e.g., lecithin or acacia); non-aqueous vehicles (e.g., almond oil, oily esters, or fractionated vegetable oils); and preservatives (e.g., methyl or propyl-p-hydroxybenzoates or sorbic acid).

[0872] Formulations suitable for rectal administration can be provided as unit dose suppositories. These can be prepared by admixing the active compound with one or more conventional solid carriers, for example, cocoa butter, and then shaping the resulting mixture.

[0873] Formulations suitable for topical application to the skin or to the eye include ointments, creams, lotions, pastes, gels, sprays, aerosols, and oils. Exemplary carriers include VASELINE® petroleum jelly, lanoline, polyethylene glycols, alcohols, and combinations of two or more thereof. The topical formulations also can contain 0.05 to 15, 20, 25 percent by weight of thickeners selected from among hydroxypropyl methyl cellulose, methyl cellulose, polyvinylpyrrolidone, polyvinyl alcohol, poly(alkylene glycols), polyhydroxyalkyl, (meth)acrylates or poly(meth)acrylamides. A topical formulation is often applied by instillation or as an ointment into the conjunctival sac. It also can be used for irrigation or lubrication of the eye, facial sinuses, and external auditory meatus. It also can be injected into the anterior eye chamber and other places. A topical formulation in the liquid state can be also present in a hydrophilic three-dimensional polymer matrix in the form of a strip or contact lens, from which the active components are released.

[0874] For administration by inhalation, the compounds for use herein can be delivered in the form of an aerosol spray presentation from pressurized packs or a nebulizer, with the use of a suitable propellant, e.g., dichlorodifluoromethane, trichlorofluoromethane, dichlorotetrafluoroethane, carbon dioxide or other suitable gas. In the case of a pressurized aerosol, the dosage unit can be determined by providing a valve to deliver a metered amount. Capsules and cartridges of, e.g., gelatin, for use in an inhaler or insufflator can be formulated containing a powder mix of the compound and a suitable powder base such as lactose or starch.

[0875] Formulations suitable for buccal (sublingual) administration include, for example, lozenges containing the active compound in a flavored base, usually sucrose and acacia or tragacanth; and pastilles containing the compound in an inert base such as gelatin and glycerin or sucrose and acacia.

[0876] Pharmaceutical compositions of ECD multimers can be formulated for parenteral administration by injection, e.g., by bolus injection or continuous infusion. Formulations for injection can be presented in unit dosage form, e.g., in ampules or in multi-dose containers, with an added preservative. The compositions can be suspensions, solutions, or emulsions in oily or aqueous vehicles, and can contain formulatory agents, such as suspending, stabilizing and/or dispersing agents. Alternatively, the active ingredient can be in powder form for reconstitution with a suitable vehicle, e.g., sterile pyrogen-free water or other solvents, before use.

[0877] Formulations suitable for transdermal administration can be presented as discrete patches adapted to remain in intimate contact with the epidermis of the recipient for a prolonged period of time. Such patches suitably contain the active compound as an optionally buffered aqueous solution of, for example, 0.1 to 0.2 M concentration with respect to the active compound. Formulations suitable for transdermal administration also can be delivered by iontophoresis (see, e.g., Pharmaceutical Research 3(6), 318 (1986)) and typically take the form of an optionally buffered aqueous solution of the active compound.

[0878] Pharmaceutical compositions also can be administered by controlled release means and/or delivery devices (see, e.g., in U.S. Pat. Nos. 3,536,809; 3,598,123; 3,630,200; 3,845,770; 3,847,770; 3,916,899; 4,008,719; 4,687,610; 4,769,027; 5,059,595; 5,073,543; 5,120,548; 5,354,566; 5,591,767; 5,639,476; 5,674,533 and 5,733,566).

[0879] In certain embodiments, liposomes and/or nanoparticles also can be employed with ECD multimer administration. Liposomes are formed from phospholipids that are dispersed in an aqueous medium and spontaneously form multilamellar concentric bilayer vesicles (also termed multilamellar vesicles (MLVs). MLVs generally have diameters of from 25 nm to 4 μm. Sonication of MHLVs results in the formation of small unilamellar vesicles (SUVs) with diameters in the range of 200 to 500 Å, containing an aqueous solution in the core.

[0880] Phospholipids can form a variety of structures other than liposomes when dispersed in water, depending on the molar ratio of lipid to water. At low ratios, the liposomes form. Physical characteristics of liposomes depend on pH, ionic strength, and the presence of divalent cations. Liposomes can show low permeability to ionic and polar substances, but at elevated temperatures undergo a phase transition which markedly alters their permeability. The phase transition involves a change from a closely packed, ordered structure, known as the gel state, to a loosely packed, less-ordered structure, known as the fluid state. This occurs at a characteristic phase-transition temperature and results in an increase in permeability to ions, sugars, and drugs.

[0881] Liposomes interact with cells via different mechanisms: endocytosis by phagocytic cells of the reticuloendothelial system such as macrophages and neutrophils; adsorption to the cell surface, either by nonspecific weak hydrophobic or electrostatic forces, or by specific interactions with cell-surface components; fusion with the plasma cell membrane by insertion of the lipid bilayer of the liposome into the plasma membrane, with simultaneous release of liposomal contents into the cytoplasm; and by transfer of liposomal lipids to cellular or subcellular membranes, or vice versa, without any association of the liposome contents. Varying the liposome formulation can alter which mechanism is operative, although more than one can operate at the same time.

[0882] Nanocapsules can generally entrap compounds in a stable and reproducible way. To avoid side effects due to intracellular polymeric overloading, such ultrafine particles (sized about 0.1 micrometers in diameter) can be designed using polymers that can be degraded in vivo. Biodegradable polyalkyl-cyanoacrylate nanoparticles that meet these requirements are contemplated for use herein, and such particles can be easily made.

[0883] Administration methods can be employed to decrease the exposure of ECD multimers to degradative processes, such as proteolytic degradation and immunological intervention via antigenic and immunogenic responses. Examples of such methods include local administration at the site of treatment. ECD multimers also can be modified to modulate serum stability and half-life as well as reduce immunogenicity. Such modifications can be effected by any means known in the art and include addition of molecules to ECD multimers such as PEGylation, and addition of carrier proteins such as serum albumin, and glycosylation (Raju et al. (2001) Biochemistry 40(3):8868-76; van Der Auwera et al. (2001) Am J Hematol. 66(4):245-51.). In addition, the Fc portion of those ECD multimers formed between the multimerization of Fc modulates serum stability and half-life.

[0884] PEGylation of therapeutics has been reported to increase resistance to proteolysis; increase plasma half-life, and decrease antigenicity and immunogenicity. Examples of PEGylation methodologies are known in the art (see for example, Lu and Felix, Int. J. Peptide Protein Res., 43: 127-138 (1994); Lu and Felix, Peptide Res., 6: 142-6(1993); Felix et al., Int. J. Peptide Res., 46: 253-64, 1995; Benhar et al., J. Biol. Chem., 269: 13398-404, 1994; Brumeanu et al., J Immunol., 154: 3088-95, 1995; see also, Caliceti et al. (2003) Adv. Drug Deliv. Rev. 55(10):1261-77 and Molineux (2003) Pharmacotherapy 23 (8 Pt 2):3S-8S). Pegylation also can be used in the delivery of nucleic acid molecules in vivo. For example, pegylation of adenovirus can increase stability and gene transfer (see, e.g., Cheng et al. (2003) Pharm. Res. 20(9): 1444-51).

[0885] Desirable blood levels can be maintained by a continuous infusion of the active agent as ascertained by plasma levels. It should be noted that the attending physician would know how to and when to terminate, interrupt or adjust therapy to lower dosage due to toxicity, or bone marrow, liver, or kidney dysfunctions. Conversely, the attending physician would also know how to and when to adjust treatment to higher levels if the clinical response is not adequate (precluding toxic side effects), administered, for example, by oral, pulmonary, parental (intramuscular, intraperitoneal, intravenous (IV) or subcutaneous injection), inhalation (via a fine powder formulation), transdermal, nasal, vaginal, rectal, or sublingual routes of administration and can be formulated in dosage forms appropriate for each route of administration (see, e.g., International PCT application Nos. WO 93/25221 and WO 94/17784; and European Patent Application 613,683).

[0886] An ECD multimer is included in the pharmaceutically acceptable carrier in an amount sufficient to exert a therapeutically useful effect in the absence of undesirable side effects on the patient treated. Therapeutically effective concentration can be determined empirically by testing the compounds in known in vitro and in vivo systems, such as the assays provided herein.

[0887] The concentration of an ECD multimer in the composition will depend on absorption, inactivation and excretion rates of the complex, the physicochemical characteristics of the complex, the dosage schedule, and amount administered as well as other factors known to those of skill in the art.

[0888] The amount of an ECD multimer to be administered for the treatment of a disease or condition, for example cancer, autoimmune disease and infection can be determined by standard clinical techniques. In addition, in vitro assays and animal models can be employed to help identify optimal dosage ranges. The precise dosage, which can be determined empirically, can depend on the route of administration and the seriousness of the disease. Suitable dosage ranges for administration can range from about 0.01 pg/kg body weight to 1 mg/kg body weight and more typically 0.05 mg/kg to 200 mg/kg ECD multimer: patient weight.

[0889] An ECD multimer can be administered at once, or can be divided into a number of smaller doses to be administered at intervals of time. ECD multimers can be administered in one or more doses over the course of a treatment time for example over several hours, days, weeks, or months. In some cases, continuous administration is useful. It is understood that the precise dosage and duration of treatment is a function of the disease being treated and can be determined empirically using known testing protocols or by extrapolation from in vivo or in vitro test data. It is to be noted that concentrations and dosage values also can vary with the severity of the condition to be alleviated. It is to be further understood that for any particular subject, specific dosage regimens should be adjusted over time according to the individual need and the professional judgment of the person administering or supervising the administration of the compositions, and that the concentration ranges set forth herein are exemplary only and are not intended to limit the scope or use of compositions and combinations containing them.

### K. EXEMPLARY METHODS OF TREATMENT WITH ECD MULTIMERS MIXTURES

[0890] Provided herein are methods of treatment with ECD multimers and mixtures of ECD multimers for diseases and conditions. ECD multimers, including HER ECD multimers, can be used in the treatment of a variety of diseases and conditions involving CSRs, including RTKs and in particular the HER family of proteins, including those described herein. CSR signaling is involved in the etiology of a variety of diseases and disorders, and any such disease or disorder thereof is contemplated for treatment by an ECD multimer provided herein. Treatments using the ECD multimers provided herein, include, but are not limited to treatment of angiogenesis-related diseases and conditions including ocular diseases, atherosclerosis, cancer and vascular injuries, neurodegenerative diseases, including Alzheimer's disease, inflammatory diseases and conditions, including atherosclerosis, diseases and conditions associated with cell proliferation including cancers, and smooth muscle cell-associated conditions, and various autoimmune diseases. Exemplary treatments and preclinical studies are described for treatments and therapies of RTK-mediated, particularly HER-mediated, diseases and disorders by ECD multimers. Exemplary treatments of other CSR-mediated diseases and disorders such as, but not limited to, RAGE-mediated diseases and disorders also are described. Such descriptions are meant to be exemplary only and are not limited to a particular ECD multimer. Treatment can be effected by administering by suitable route formulations of the molecule, which can be provided in compositions as polypeptides and can be linked to targeting agents, for targeted delivery or encapsulated in delivery vehicles, such as liposomes, or delivered as naked nucleic acids or in vectors. The particular treatment and dosage can be determined by one of skill in the art. Considerations in assessing treatment include, for example, the disease to be treated, the severity and course of the disease, whether the molecule is administered for preventive or therapeutic purposes, previous therapy, the patient's clinical history and response to therapy, and the discretion of the attending physician.

### 1. HER-Mediated Diseases or Disorders

[0891] HER (ErbB)-related diseases or HER receptor-mediated disease are any diseases, conditions, or disorders in which a HER receptor and/or ligand is implicated in some aspect of the etiology, pathology, or development thereof. In particular, involvement includes, for example, expression or overexpression or activity of a HER receptor family member or ligand. Diseases, include, but are not limited to proliferative diseases, including cancers, such as, but not limited to, pancreatic, gastric, head and neck, cervical, lung, colorectal, endometrial, prostate, esophageal, ovarian, uterine, glioma, bladder, or breast cancer. Other conditions, include those involving cell proliferation and/or migration, including those involving pathological inflammatory responses, non-malignant hyperproliferative diseases, such as ocular conditions, skin conditions, conditions resulting from smooth muscle cell proliferation and/or migration, such as stenoses, including restenosis, atherosclerosis, muscle thickening of the bladder, heart or other muscles, endometriosis, or rheumatoid arthritis. Other diseases that can be treated with a HER ECD multimer provided herein include any disease or disorder mediated by a HER family receptor or its ligands including, but not limited to, aggressiveness, growth retardation, schizophrenia, shock, Parkinson's disease, Alzheimer's disease, cardiomyopathy congestive, pre-eclampsia, nervous system disease, and heart failure. Exemplary of such diseases or treatments are set forth below.

a. Cancer

[0892] As discussed, HER family receptors are frequently expressed in a variety or human carcinomas, and their expression has been associated with the pathogenesis of many cancers. For example, hyperactivation or dysregulation of HER signaling can lead to aberrant cell activation, including cell proliferation, angiogenesis, and migration and invasion, associated with tumorigenesis. Several mechanisms can account for the dysregulation of HER family receptor signaling that occurs in cancer, including, but not limited to, overproduction of ligands, overproduction of receptors, or constitutive activation of receptors. Because of their roles in cancers and other diseases, HER receptors are therapeutic targets. Co-expression of HER family members, however, often results in lack of response to such therapies, or in development of resistance through compensatory upregulation of alternative HER family members. Thus, HER ECD multimers provided herein can be used as an alternative treatment for cancer, particularly in cancers characterized or associated by co-expression of two or more cell surface receptors.

[0893] ECD multimers containing all or a part of a HER1, HER2, HER3, or HER4 ECD can be used in treatment of cancers. Provided are methods for treating various types of cancer, inflammatory diseases, angiogenic diseases or hyperproliferative diseases by administering a therapeutically effective amount of a pharmaceutical composition comprising a mixture of heteromultimers and homomultimers wherein the heteromultimer comprises an ECD or portion thereof from HER1 and another ECD or portion thereof from HER3 and wherein the homomultimers comprise an ECD or portion thereof from HER1 or an ECD or portion thereof from HER3. In some cases, the cancer is pancreatic, gastric, head and neck, cervical, lung, colorectal, endometrial, prostate, esophageal, ovarian, uterine, glioma, bladder, renal or breast cancer. In other cases, the disease being treated is a proliferative disease. Non-limiting examples of such proliferative disease include proliferation and/or migration of smooth muscle cells, or is a disease of the anterior eye, or is a diabetic retinopathy, or psoriasis. In other cases, the disease being treated is restenosis, ophthalmic disorders, stenosis, atherosclerosis, hypertension from thickening of blood vessels, bladder diseases, and obstructive airway diseases.

[0894] Examples of cancer to be treated herein include, but are not limited to, carcinoma, lymphoma, blastoma, sarcoma, and leukemia or lymphoid malignancies. Additional examples of such cancers include squamous cell cancer (e.g., epithelial squamous cell cancer), lung cancer including small-cell lung cancer, non-small cell lung cancer, adenocarcinoma of the lung and squamous carcinoma of the lung, cancer of the peritoneum, hepatocellular cancer, gastric or stomach cancer including gastrointestinal cancer, pancreatic cancer, glioblastoma, cervical cancer, ovarian cancer, liver cancer, bladder cancer, hepatoma, breast cancer, colon cancer, rectal cancer, renal cell cancer, esophageal cancer, glioma, colorectal cancer, endometrial or uterine carcinoma, salivary gland carcinoma, kidney or renal cancer, prostate cancer, vulval cancer, thyroid cancer, hepatic carcinoma, anal carcinoma, penile carcinoma, as well as head and neck cancer. Combination therapies can be used with HER ECD multimers including anti-hormonal compounds, cardioprotectants, anti-cancer agents such as chemotherapeutics and growth inhibitory agents, and any other such as is described herein.

[0895] Cancers treatable with HER ECD multimers are generally cancers expressing at least one HER receptor, typically more than one HER receptor. Such cancers can be identified by any means known in the art for detecting HER expression. For example, HER2 expression can be assessed using a diagnostic/prognostic assay, such as, for example, the product sold under the trademark HercepTest® (Dako North America, Inc.), and any other such assay. Paraffin embedded tissue sections from a tumor biopsy are subjected to the HIC assay and accorded a HER2 protein staining intensity criteria. Tumors accorded with less than a threshold score can be characterized as not overexpressing HER2, whereas those tumors with greater than or equal to a threshold score can be characterized as overexpressing HER2. In one example of treatment, HER2-overexpressing tumors are assessed as candidates for treatment with a HER ECD multimer, such as any HER ECD multimer provided herein.

b. Angiogenesis

[0896] Angiogenesis is a process involving the regulated formation of new blood vessels from existing ones, often that feed tumors and promote cancer metastasis. The production of VEGF is an essential factor for angiogenesis and the migration of cancer cells. A number of factors induce VEGF expression including EGF and TGF-α signaling through HER family receptors. In fact, both HER1 and HER2 are cancer-associated genes implicated in angiogenesis (Yance et al. (2006) Int. Can. Ther., 5: 9-29). HER family receptors also are differentially expressed on endothelial cells. For example, on normal endothelial cells, HER2, HER3, and HER4 are expressed, but on tumor-derived endothelial cells HER1, HER2, and HER4 are expressed (Amin et al. (2006) Cancer Res. 66:2173-80). Thus, as compared to normal cells, tumor-derived endothelial cells have a loss of HER3 expression and a gain of HER1 expression, consistent with the responsiveness of endothelial cells to EGF in the production of VEGF and the promotion of angiogenesis.

[0897] Targeting of HER family receptors, such as by ECD multimers provided herein, can be used as a treatment of angiogenesis. In vitro or in vivo assays can be used to assess the effects of ECD multimers on angiogenesis. For example, human breast cancer-derived MDA-MB-231 cells, which secrete the angiogenic factor VEGF, can be tested to determine if ECD multimers can antagonize the production of angiogenic factors. In addition, the activity of angiogenic factors produced in the supernatant of these cells, or in the presence of recombinant angiogenic factors in the presence or absence of ECD multimers, can be tested by assaying for the proliferation of human umbilical vein endothelial cells (HUVECs). HUVEC assays that assess [3H]-thymidine incorporation into proliferating HUVECs can be compared to determine if proliferation is reduced in the presence of ECD multimers.

c. Neuregulin-Associated Diseases

[0898] The Neuregulins (NRGs) are a complex set of ligands (NRGs 1-4) encoded by four different genes. Some of these molecules have been shown to be active in a transmembrane precursor form, such as free ligand (composed of the NRG extracellular domain). The transmembrane and free forms of NRG exert their biological effect through the HER1-4 receptors. These ligands have roles in neuromuscular synapse development, neuron-glial interactions, and cell interactions regulating heart development and function. Therapeutics derived from the extracellular domains of HERs1-4, such as monomeric, homodimeric, and heterodimeric molecules that contain the ligand binding domains of the HER family, can be used for treatment of diseases, such as neurological or neuromuscular diseases, which are associated with, e.g., caused by or aggravated by, exposure to at least one NRG. In one embodiment, the disease is associated with NRG1, including type I, II, and III of NRG1, which all bind to HER3 and HER4. Examples of NRG-associated diseases which may be treated by HER ECD therapeutics as described herein include, but are not limited to, Alzheimer's disease and schizophrenia.

[0899] An example of a neurological disease in which NRG is dysregulated may be Alzheimer's disease (Chaudhury et al. (2003) J Neuropathol Exp Neurol 62:42-54). Chaudhury et al. examined the expression and distribution of NRG1 and the erbB kinases in the hippocampus from cognitively normal aging humans, Alzheimer's disease patients, and double transgenic mice that express the Alzheimer's disease phenotype. The expression of both NRG-1 and erbB4 is specifically associated with reactive cellular elements within neuritic plaques, suggesting autocrine and/or paracrine interactions. HER ECD multimers as described herein can be used to treat Alzheimer's disease and related conditions. A variety of mouse models are available for human Alzheimer's disease including transgenic mice overexpressing mutant amyloid precursor protein and mice expressing familial autosomal dominant-linked PS1 and mice expressing both proteins (PS1 M146L/APPK670N:M671L). Alzheimer's models are treated such as by injection of HER ECD multimers. Plaque development can be assessed such as by observation of neuritic plaques in the hippocampus, entorhinal cortex, and cerebral cortex using staining and antibody immunoreactivity assays.

[0900] Schizophrenia is a serious disease of the nervous system. An estimated 1% of the world's population is afflicted with the severe behavioral, emotional, and cognitive impairments characteristic of the disease. Currently, it is considered a syndrome with a dearth of molecular markers to aid in diagnosis. Evidence for an association between NRG and schizophrenia was first presented by Stefannson et al. ((2002) Am J Hum Genet 71:877-892). More recent data have suggested that increased levels of NRG1 transcripts are present in prefrontal cortex and peripheral leukocytes of patients with schizophrenia (Hashimoto et al. (2004) Mol Psychiatry 9:299-307; Petryshen et al. (2005) Mol Psychiatry 10:366-74). The connection between NRG1 and schizophrenia may be related to NRG1 reversal of long-term potentiation of certain neural synapses (Kwon et al. (2005) J Neurosci 25:9378-83). HER ECD multimers as described herein can be used to treat schizophrenia.

d. Smooth Muscle Proliferative-Related Diseases and Conditions

[0901] HER ECD multimers can be utilized for the treatment of a variety of diseases and conditions involving smooth muscle cell proliferation in a mammal, such as a human. An example is treatment of cardiac diseases involving proliferation of vascular smooth muscle cells (VSMC) and leading to intimal hyperplasia such as vascular stenosis, restenosis resulting from angioplasty or surgery or stent implants, atherosclerosis, and hypertension. In such conditions, an interplay of various cells and cytokines released act in autocrine, paracrine or juxtacrine manner, which result in migration of VSMCs from their normal location in media to the damaged intima. The migrated VSMCs proliferate excessively and lead to thickening of intima, which results in stenosis or occlusion of blood vessels. The problem is compounded by platelet aggregation and deposition at the site of lesion. α-thrombin, a multifunctional serine protease, is concentrated at site of vascular injury and stimulates VSMCs proliferation. Following activation of this receptor, VSMCs produce and secrete various autocrine growth factors, including PDGF-AA, HB-EGF and TGF. EGFRs are involved in signal transduction cascades that ultimately result in migration and proliferation of fibroblasts and VSMCs, as well as stimulation of VSMCs to secrete various factors that are mitogenic for endothelial cells and induction of chemotactic response in endothelial cells. Treatment with HER ECD multimers can be used to modulate such signaling and responses.

[0902] HER ECD multimers, such as HER ECD heteromultimers containing all or part of the ECD of one or both of HER2 and HER3 can be used to treat conditions where HERs such as HER2 and HER3 modulate bladder SMCs, such as bladder wall thickening that occurs in response to obstructive syndromes affecting the lower urinary tract. HER ECD multimers can be used in controlling proliferation of bladder smooth muscle cells, and consequently in the prevention or treatment of urinary obstructive syndromes.

[0903] HER ECD multimers can be used to treat obstructive airway diseases with underlying pathology involving smooth muscle cell proliferation. One example is asthma which manifests in airway inflammation and bronchoconstriction. EGF has been shown to stimulate proliferation of human airway SMCs and can be a factor involved in the pathological proliferation of airway SMCs in obstructive airway diseases. HER ECD multimers can be used to modulate effects and responses to EGF by HER1

### 2. RTK-Mediated Diseases or Disorders

a. Angiogenesis-Related Ocular Conditions

[0904] ECD multimers including, but not limited to, those containing one or more ECD of a VEGFR, PDGFR, TIE/TEK, FGF, EGFR, and EphA, or portion thereof, can be used in treatment of angiogenesis related ocular diseases and conditions, including ocular diseases involving neovascularization. Ocular neovascular disease is characterized by invasion of new blood vessels into the structures of the eye, such as the retina or cornea. It is the most common cause of blindness and is involved in approximately twenty eye diseases. In age-related macular degeneration, the associated visual problems are caused by an ingrowth of choroidal capillaries through defects in Bruch's membrane with proliferation of fibrovascular tissue beneath the retinal pigment epithelium. Angiogenic damage also is associated with diabetic retinopathy, retinopathy of prematurity, corneal graft rejection, neovascular glaucoma and retrolental fibroplasia. Other diseases associated with corneal neovascularization include, but are not limited to, epidemic keratoconjunctivitis, Vitamin A deficiency, contact lens overwear, atopic keratitis, superior limbic keratitis, pterygium keratitis sicca, Sjogren's syndrome, acne rosacea, phlyctenulosis, syphilis, Mycobacteria infections, lipid degeneration, chemical burns, bacterial ulcers, fungal ulcers, Herpes simplex infections, Herpes zoster infections, protozoan infections, Kaposi sarcoma, Mooren's ulcer, Terrien's marginal degeneration, marginal keratolysis, rheumatoid arthritis, systemic lupus, polyarteritis, trauma, Wegener's sarcoidosis, Scleritis, Stevens Johnson disease, pemphigoid radial keratotomy, and corneal graph rejection. Diseases associated with retinal/choroidal neovascularization include, but are not limited to, diabetic retinopathy, macular degeneration, sickle cell anemia, sarcoid, syphilis, pseudoxanthoma elasticum, Paget's disease, vein occlusion, artery occlusion, carotid obstructive disease, chronic uveitis/vitritis, mycobacterial infections, Lyme's disease, systemic lupus erythematosus, retinopathy of prematurity, Eales disease, Bechet's disease, infections causing a retinitis or choroiditis, presumed ocular histoplasmosis, Best's disease, myopia, optic pits, Stargardt's disease, pars planitis, chronic retinal detachment, hyperviscosity syndromes, toxoplasmosis, trauma and post-laser complications. Other diseases include, but are not limited to, diseases associated with rubeosis (neovascularization of the angle) and diseases caused by the abnormal proliferation of fibrovascular or fibrous tissue including all forms of proliferative vitreoretinopathy.

[0905] ECD multimer therapeutic effects on angiogenesis such as in treatment of ocular diseases can be assessed in animal models, for example in cornea implants, such as described herein. For example, modulation of angiogenesis such as mediated by an RTK can be assessed in a nude mouse model such as epidermoid A431 tumors in nude mice and VEGF- or PIGF-transduced rat C6 gliomas implanted in nude mice. ECD multimers can be injected as protein locally or systemically, Tumors can be compared between control treated and ECD multimer treated models to observe phenotypes of tumor inhibition including poorly vascularized and pale tumors, necrosis, reduced proliferation, and increased tumor-cell apoptosis.

[0906] Examples of ocular disorders that can be treated with an ECD heteromultimer containing all or part of a TIE/TEK ECD are eye diseases characterized by ocular neovascularization including, but not limited to, diabetic retinopathy (a major complication of diabetes), retinopathy of prematurity (this devastating eye condition, that frequently leads to chronic vision problems and carries a high risk of blindness, is a severe complication during the care of premature infants), neovascular glaucoma, retinoblastoma, retrolental fibroplasia, rubeosis, uveitis, macular degeneration, and corneal graft neovascularization. Other eye inflammatory diseases, ocular tumors, and diseases associated with choroidal or iris neovascularization also can be treated with TIE/TEK ECD multimers.

[0907] ECD heteromultimers containing all or part of a PDGFR ECD also can be used in the treatment of proliferative vitreoretinopathy. Rabbit conjunctival fibroblasts (RCFs) can be injected into the vitreous part of an eye. For example, in a rabbit animal model, approximately 1×10⁵ RCFs are injected by gas vitrectomy. Administration of an ECD multimer locally or systemically can be injected on the same day. Effects on proliferative vitreoretinopathy can be observed, for example, 2-4 weeks following surgery, such as attenuation of the disease symptoms.

[0908] ECD heteromultimers containing all or part of an EphA ECD can be used to treat diseases or conditions with mis-regulated and/or inappropriate angiogenesis, such as in eye diseases. For example, an EphA ECD multimer can be assessed in an animal model such as a mouse corneal model for effects on ephrinA-1 induced angiogenesis. Hydron pellets containing ephrinA-1 alone or with an ECD multimer are implanted in mouse cornea. Visual observations are taken on days following implantation to observe ECD multimer inhibition or reduction of angiogenesis.

b. Angiogenesis-Related Atherosclerosis

[0909] RTK ECD multimers, for example ECD heteromultimers containing one or both of all or part of an ECD of a VEGFR1 (Flt-1) or TIE/TEK, can be used to treat angiogenesis conditions related to atherosclerosis such as neovascularization of atherosclerosis plaques. Plaques formed within the lumen of blood vessels have been shown to have angiogenic stimulatory activity. VEGF expression in human coronary atherosclerotic lesions is associated with the progression of human coronary atherosclerosis.

[0910] Animal models can be used to assess ECD multimers in treatment of atherosclerosis. Apolipoprotein-E deficient mice (ApoE^{-/-}) are prone to atherosclerosis. Such mice are treated by injecting an ECD multimer, for example a VEGFR ECD multimer, over a time course such as for 5 weeks starting at 5, 10 and weeks of age. Lesions at the aortic root are assessed between control ApoE^{-/-} mice and isoform-treated ApoE^{-/-} mice to observe reduction of atherosclerotic lesions in isoform-treated mice.

c. Additional Angiogenesis-Related Treatments

[0911] RTK ECD multimers, such as ECD heteromultimers containing all or part of a VEGFR ECD, or all or part of an EphA ECD also can be used to treat angiogenic and inflammatory-related conditions such as proliferation of synoviocytes, infiltration of inflammatory cells, cartilage destruction and pannus formation, such as are present in rheumatoid arthritis (RA). An autoimmune model of collagen type-II induced arthritis, such as polyarticular arthritis induced in mice, can be used as a model for human RA. Mice treated with an ECD multimer, such as by local injection of protein, can be observed for reduction of arthritic symptoms including paw swelling, erythema and ankylosis. Reduction in synovial angiogenesis and synovial inflammation also can be observed. Angiogenesis plays a key role in the formation and maintenance of the pannus in RA. ECD multimers can be used alone and in combination with other isoforms and other treatments to modulate angiogenesis. For example, angiogenesis inhibitors can be used in combination with ECD multimers to treat RA. Exemplary angiogenesis inhibitors include, but are not limited to, angiostatin, antiangiogenic antithrombin III, canstatin, cartilage derived inhibitor, fibronectin fragment, IL-12, vasculostatin and others known in the art (see, for example, Paleolog (2002) Arthritis Research Therapy 4 (supp 3) S81-S90).

[0912] Other angiogenesis-related conditions amenable to treatment with ECD multimers, including for example VEGFR ECD multimers, include hemangioma. One of the most frequent angiogenic diseases of childhood is the hemangioma. In most cases, the tumors are benign and regress without intervention. In more severe cases, the tumors progress to large, cavernous, and infiltrative forms and create clinical complications. Systemic forms of hemangiomas, the hemangiomatoses, have a high mortality rate. Many cases of hemangiomas exist that cannot be treated or are difficult to treat with therapeutics currently in use.

[0913] ECD multimers, such as VEGFR ECD multimers, can be employed in the treatment of such diseases and conditions where angiogenesis is responsible for damage such as in Osler-Weber-Rendu disease, or hereditary hemorrhagic telangiectasia. This is an inherited disease characterized by multiple small angiomas, tumors of blood or lymph vessels. The angiomas are found in the skin and mucous membranes, often accompanied by epistaxis (nosebleeds) or gastrointestinal bleeding and sometimes with pulmonary or hepatic arteriovenous fistula. Diseases and disorders characterized by undesirable vascular permeability also can be treated by ECD multimers. These include edema associated with brain tumors, ascites associated with malignancies, Meigs' syndrome, lung inflammation, nephrotic syndrome, pericardial effusion, and pleural effusion.

[0914] Angiogenesis also is involved in normal physiological processes such as reproduction and wound healing. Angiogenesis is an important step in ovulation and also in implantation of the blastula after fertilization. Modulation of angiogenesis by ECD multimers, such as ECD heteromultimers containing all or part of a VEGFR ECD can be used to induce amenorrhea, to block ovulation or to prevent implantation by the blastula. ECD multimers also can be used in surgical procedures. For example, in wound healing, excessive repair or fibroplasia can be a detrimental side effect of surgical procedures and can be caused or exacerbated by angiogenesis. Adhesions are a frequent complication of surgery and lead to problems such as small bowel obstruction.

[0915] RTK ECD multimers useful in treatment of angiogenesis-related diseases and conditions also can be used in combination therapies such as with anti-angiogenesis drugs, molecules which interact with other signaling molecules in RTK-related pathways, including modulation of VEGFR ligands or other growth factor ligand. For example, the known anti-rheumatic drug, bucillamine (BUC), was shown to include within its mechanism of action the inhibition of VEGF production by synovial cells. Anti-rheumatic effects of BUC are mediated by suppression of angiogenesis and synovial proliferation in the arthritic synovium through the inhibition of VEGF production by synovial cells. Combination therapy of such drugs with EGF multimers can allow multiple mechanisms and sites of action for treatment.

d. Cancers

[0916] RTK isoforms such as isoforms of TIE/TEK, VEGFR, MET and FGFR can be used in treatment of cancers. RTK isoforms including, but not limited to, VEGFR isoforms such as Flt1 isoforms, FGFR isoforms such as FGFR4 isoforms, and EphA1 isoforms can be used to treat cancer. Examples of cancer to be treated herein include, but are not limited to, carcinoma, lymphoma, blastoma, sarcoma, and leukemia or lymphoid malignancies. Additional examples of such cancers include squamous cell cancer (e.g., epithelial squamous cell cancer), lung cancer including small-cell lung cancer, non-small cell lung cancer, adenocarcinoma of the lung and squamous carcinoma of the lung, cancer of the peritoneum, hepatocellular cancer, gastric or stomach cancer including gastrointestinal cancer, pancreatic cancer, glioblastoma, cervical cancer, ovarian cancer, liver cancer, bladder cancer, hepatoma, breast cancer, colon cancer, rectal cancer, colorectal cancer, endometrial or uterine carcinoma, salivary gland carcinoma, kidney or renal cancer, prostate cancer, vulval cancer, thyroid cancer, hepatic carcinoma, anal carcinoma, penile carcinoma, as well as head and neck cancer.

[0917] For example, ECD heteromultimers containing all or part of a TIE/TEK ECD can be used in the treatment of cancers such as by modulating tumor-related angiogenesis. Vascularization is involved in regulating cancer growth and spread. For example, inhibition of angiogenesis and neovascularization inhibits solid tumor growth and expansion. Tie/Tek receptors such as Tie2 have been shown to influence vascular development in normal and cancerous tissues. TIE/TEK ECD multimers can be used as an inhibitor of tumor angiogenesis. Effects on angiogenesis can be monitored in an animal model such as by treating rat cornea with TIE/TEK ECD multimer formulated as conditioned media in hydron pellets surgically implanted into a micropocket of a rat cornea or as purified protein (e.g., 100 μg/dose) administered to the window chamber. For example, rat models such as F344 rats with avascular corneas can be used in combination with tumor-cell conditioned media or by implanting a fragment of a tumor into the window chamber of an eye to induce angiogenesis. Corneas can be examined histologically to detect inhibition of angiogenesis induced by tumor-cell conditioned media. TIE/TEK ECD multimers also can be used to treat malignant and metastatic conditions such as solid tumors, including primary and metastatic sarcomas and carcinomas.

[0918] ECD heteromultimers containing all or part of a FGFR4 ECD can be used to treat cancers, for example pituitary tumors. Animal models can be used to mimic progression of human pituitary tumor progress. For example, an N-terminally shortened form of FGFR, ptd-FGFR4, expressed in transgenic mice recapitulates pituitary tumorigenesis (Ezzat et al. (2002) J. Clin. Invest. 109:69-78), including pituitary adenoma formation in the absence of prolonged and massive hyperplasia. FGFR4 ECD multimers can be administered to ptd-FGFR4 mice and the pituitary architecture and course of tumor progression compared with control mice.

### 3. Other CSR-Mediated Diseases or Disorders

[0919] Also provided herein are treatment of a disease with an ECD heteromultimers containing at least as one of the components a non-RTK CSR such as, but not limited to, a TNFR or a RAGE. For example, an ECD multimer containing at least all or part of an ECD of a RAGE can be used to treat diabetes-related diseases and conditions including periodontal, autoimmune, vascular, and tubulointerstitial diseases. Treatments using RAGE ECD multimers also include treatment of ocular disease including macular degeneration, cardiovascular disease, neurodegenerative disease including Alzheimer's disease, inflammatory diseases and conditions including rheumatoid arthritis, and diseases and conditions associated with cell proliferation including cancers. In another example, an ECD multimer containing at least all or part of an ECD of a TNFR family of receptor can be used to treat rheumatoid arthritis, Crohn's disease, autoimmune disease, rheumatic diseases, inflammatory bowel disease, Alzheimer's disease, and other diseases particularly inflammatory diseases.

### 4. Selection of the ECD Polypeptide Components of an ECD Multimer

[0920] Determination of the components of an ECD multimer is a consideration when determining what ECD multimer molecule to use in treating a selected disease. Several factors can be empirically determined to rationally design an ECD heteromultimer for the treatment of a disease or disorder. First, the disease to be treated should be identified. Typically, such a disease is one which exhibits resistance to a single receptor-targeted therapy, for example, due to overexpression of multiple CSRs, including RTKS and in particular HERs, that contribute to the etiology of the disease. Second, one or more CSRs or ligands of a CSR involved in the etiology of the disease can be identified. Such CSRs or ligands can be a target of the designed ECD multimer such that the ECD multimer is designed to modulate, typically inhibit the activity of the CSRs or ligands thereof. Thus, an ECD multimer would contain as a component all or part of the ECD of the targeted CSR sufficient to dimerize with the CSR, and/or all or part of an ECD sufficient to bind to the targeted CSR ligand. One of skill in the art knows or could identify CSRs, including RTKs or HER family receptors and/or their ligands that are involved in the etiology of the selected diseases. For example, the contribution of CSR to some exemplary diseases and disorders are described above. Third, the components of the ECD sufficient to bind ligand and/or to dimerize with a cognate or interacting CSR can be determined. Such portions of exemplary ECD molecules are described herein, or are known or can be rationally determined by one of skill in the art, such as for example, based on alignments with related receptors and/or by using recombinant DNA techniques in concert with ligand binding assays. All or a portion of an ECD of at least two or more identified target CSR can be linked directly or indirectly to form multimers, such as for example by their separate linkage to a multimerization domain. In some instances, the multimers can be dimers or higher ordered multimers, depending on the method used to link the separate components. The resultant ECD multimer is then a candidate therapeutic for treating the selected disease.

[0921] For example, HER receptors, such as for example HER1, are involved in a variety of cancers, including but not limited to, those where HER1 is overexpressed (i.e., colorectal, head and neck, prostate, pancreatic, liver, lung, renal cell, breast, esophageal, ovarian, cervix/uterus, glioma, bladder, and others). Thus, an ECD multimer can be designed that has as a component all or part of a HER1 ECD to target HER1 signaling as a mechanism of treating cancer. In the design of the heteromultimer, another CSR molecule that also is involved in the selected disease can be identified and used as the second polypeptide component of the heteromultimer. For example, other HER receptors and their ligands, are overexpressed or involved in a variety of cancers. For example, like HER1, HER3 is overexpressed in breast, colorectal, pancreatic, liver, and esophageal cancers. Thus, a candidate ECD therapeutic for the treatment of a variety of cancers would be one that is a heteromultimer of all or part of the ECD of HER1 and all or part of the ECD of HER2. In a second example, a selected disease could be angiogenesis. One of skill in the art knows that both VEGFR1 and RAGE are involved in the etiology of angiogenesis. Thus, a heteromultimer can be designed as a candidate therapeutic that contains all or part of the ECD of a VEGFR1 and all or part of the ECD of a RAGE.

### 5. Patient/Subject Selection

[0922] A variety of diseases and disorders are caused by the inappropriate activation of a CSR, particularly a HER family receptor due to, for example, overproduction of ligands, overproduction of receptors, or constitutive activation of receptors. Often, a patient's response to a drug or molecule, such as ECD multimers provided herein, can be predicated on the correlative expression of a CSR or ligand to which the drug or molecule is targeted. Thus, if desired, prior to treatment of a disease or disorder, a patient can be assayed for the expression of a ligand or CSR to select for those patients who are predicted to have an increased responsiveness to treatment by an ECD multimer provided herein. For example, if an ECD multimer therapeutic targets at least one of a HER1 receptor, patients can be tested for expression of HER1. In another example, if a disease to be treated is known to be mediated by a specific ligand, patients can be assayed for the expression of the ligand prior to treatment with an ECD multimer that targets that ligand. The expression of a ligand or a CSR in a patient sample (i.e., blood, serum, tumor, tissue, cell, or other source), can be compared to a control or normal sample to select for those patients that have elevated levels of a CSR or ligand. Such patient selection can ensure treatment of a sub-population of those patients most predicted to respond to a given therapeutic.

[0923] In one aspect, expression of a CSR can be assessed in a patient. In one example, expression can be determined in a diagnostic or prognostic assay by evaluating increased levels of the CSR protein present on the surface of a tissue or cell (e.g., via an immunohistochemistry assay; IHC). Alternatively, or additionally, levels of CSR-encoding nucleic acid in the cells can be assessed, e.g., via fluorescent in situ hybridization (FISH; see WO 98/45479), southern blotting, or polymerase chain reaction (PCR), such as real-time quantitative PCR (RT-PCR). In addition, overexpression of a CSR can be assessed by measuring shed antigen (e.g., a soluble CSR) in a biological fluid such as serum (see e.g., U.S. Pat. No. 4,933,294; WO91/05264; U.S. Pat. No. 5,401,638; Sias et al. (1990) J. Immunol. Methods, 132:73-80). In another assay, cells can be isolated from a patient and exposed to a CSR-specific antibody which is optionally labeled with a detectable label, e.g., a radioactive isotope or fluorescent label, and binding of the antibody to cells can be assayed. In another example, the cells of a patient can be exposed to an antibody in vivo and binding of the antibody can be evaluated by, for example external scanning for radioactivity or by analyzing a biopsy taken from a patient previously exposed to the antibody. Any other assay known to one of skill in the art can be used to determine the levels of a CSR in a patient, such as but not limited to, immunoblot, an enzyme linked immunosorbent assay (ELISA), and others. In some cases, selection of patients having increased expression of phosphorylated forms of the receptor can be used to particularly identify that subset of patients with elevated levels of activated receptor. A variety of assays are known in the art to detect phosphorylation of CSRs including, but not limited to, immunoblots or ELISAs using, for example, anti-phosphotyrosine antibodies or anti-phospho specific CSR antibodies.

[0924] In some examples, levels of a CSR ligand can be determined as an indicator of patient selection. For example, levels of a ligand in a tissue or tumor of a patient can be determined using immunohistochemistry (IHC, see e.g., Scher et al. (1995) Clin. Cancer Research, 1:545-550). Alternatively, or additionally, levels of a ligand, in a sample, tissue, tumor, or other source can be determined according to any known procedure for detecting protein or encoding nucleic acid. Exemplary of this is ELISA, PCR including RT-PCR, flow cytometry, FISH, southern blotting, and others. Additionally, as above, CSR ligands can be evaluated using an in vivo diagnostic assay, e.g., by administering a molecule (such as an antibody) which binds the molecule to be detected and is tagged with a detectable label (i.e., a radioactive label) and externally scanning the patient for localization of the label. For example, a HER family receptor ligand such as TGF-α, EGF, or amphiregulin can be assayed for in a patient sample, such as in serum, using standard ELISA methods (i.e., commercially available ELISA kits such as from R&D systems), or by immunohistochemistry and tissue microarray in sections of formalin-fixed primary tumors (see e.g., Ishikawa et al. (2005) Cancer Res. 65:9176). In another example, RT-PCR can be used to assess ligand expression in patient cell samples, such as in tumor cells (Mahtouk et al. (2005) Oncogene, 24:3512-3524), or in the blood, bone marrow, or lymph nodes (such as in mononuclear cells isolated therefrom) of a patient.

### 6. Combination Therapies

[0925] ECD multimers such as RTK ECD multimers, including HER ECD multimers, can be used in combination with each other and as mixtures thereof with other existing drugs and therapeutics to treat diseases and conditions, with a therapeutic effect that is either additive or synergistic. For example, as described herein a number of ECD multimers can be used to treat angiogenesis-related conditions and diseases and/or control tumor proliferation. Such treatments can be performed in conjunction with anti-angiogenic and/or anti-tumorigenic drugs and/or therapeutics. Examples of anti-angiogenic and antitumorigenic drugs and therapies useful for combination therapies include tyrosine kinase inhibitors and molecules capable of modulating tyrosine kinase signal transduction can be used in combination therapies including, but not limited to, 4-aminopyrrolo[2,3-d]pyrimidines (see for example, U.S. Pat. No. 5,639,757), and quinazoline compounds and compositions (e.g., U.S. Pat. No. 5,792,771. Other compounds useful in combination therapies include steroids such as the angiostatic 4,9(11)-steroids and C21-oxygenated steroids, angiostatin, endostatin, vasculostatin, canstatin and maspin, angiopoietins, bacterial polysaccharide CM101 and the antibody LM609 (U.S. Pat. No. 5,753,230), thrombospondin (TSP-1), platelet factor 4 (PF4), interferons, metalloproteinase inhibitors, pharmacological agents including AGM-1470/TNP-470, thalidomide, and carboxyamidotriazole (CAI), cortisone such as in the presence of heparin or heparin fragments, anti-Invasive Factor, retinoic acids and paclitaxel (U.S. Pat. No. 5,716,981; incorporated herein by reference), shark cartilage extract, anionic polyamide or polyurea oligomers, oxindole derivatives, estradiol derivatives and thiazolopyrimidine derivatives.

[0926] Treatment of cancers including treatment of cancers overexpressing HER can include combination therapy with anti-cancer agents such as anti-HER antibodies, small molecule tyrosine kinase inhibitors, antisense oligonucleotides, HER/ligand-directed vaccines, or immunoconjugates (i.e., antibodies coupled to radioactive isotope or cytotoxin). Exemplary of such anti-cancer agents include Gefitinib, Lapatinib, Panitumumab, Erlotinib, Cetuximab, Trastuzumab, Imatinib, a platinum complex or a nucleoside analog. Other anticancer agents, include radiation therapy or a chemotherapeutic agent and/or growth inhibitory agent, including coadministration of cocktails of different chemotherapeutic agents. Examples of cytotoxic agents or chemotherapeutic agents include, for example, taxanes (such as paclitaxel and doxetaxel) and anthracycline antibiotics, doxorubicin/adriamycine, carminomycin, daunorubicin, aminiopterin, methotrexate, methopterin, dichloro-methotrexate, mitomycin C, porfiromycin, 5-fluorouracil, 6-mercaptopurine, cytosine arabinoside, podophyllotoxin, or podophyllotosin derivatives such as etoposide or etoposide phosphate, melphalan, vinblastine, vincristine, leurosidine, vindesine, lurasidone, maytansinol, epothilone A or B, taxotere, taxol, and the like. Other such therapeutic agents include extramustine, cisplatin, combretastatin and analogs, and cyclophosphamide. Preparation and dosing schedules for such chemotherapeutic agents can be used according to manufacturers' instructions or as determined empirically by the skilled practitioner. Preparation and dosing schedules for such chemotherapy also are described in Chemotherapy Service Ed., M. C. Perry, Williams & Wilkins, Baltimore, Md. (1992).

[0927] Additional compounds can be used in combination therapy with ECD multimers. Anti-hormonal compounds can be used in combination therapies, such as with ECD multimers. Examples of such compounds include an anti-estrogen compound such as tamoxifen; an anti-progesterone such as onapristone and an anti-androgen such as flutamide, in dosages known for such molecules. It also can be beneficial to coadminister a cardioprotectant (to prevent or reduce myocardial dysfunction that can be associated with therapy) or one or more cytokines. In addition to the above therapeutic regimes, the patient can be subjected to surgical removal of cancer cells and/or radiation therapy.

[0928] Combination therapy can increase the effectiveness of treatments and in some cases, create synergistic effects such that the combination is more effective than the additive effect of the treatments separately. For example, combination therapy with a chemotherapeutic agent, e.g., a tyrosine kinase inhibitor, and an ECD multimer as described herein, may exhibit a synergistic inhibition of growth of tumor cells, i.e., a growth inhibition effect that is greater than the additive combination of the two agents administered separately.

[0929] Adjuvants and other immune modulators can be used in combination with ECD multimers in treating cancers, for example to increase immune response to tumor cells. Examples of adjuvants include, but are not limited to, bacterial DNA, nucleic acid fraction of attenuated mycobacterial cells (BCG; Bacillus-Calmette-Guerin), synthetic oligonucleotides from the BCG genome, and synthetic oligonucleotides containing CpG motifs (CpG ODN; Wooldridge et al. (1997) Blood 89:2994-2998), levamisole, aluminum hydroxide (alum), BCG, Incomplete Freud's Adjuvant (IFA), QS-21 (a plant derived immunostimulant), keyhole limpet hemocyanin (KLH), and dinitrophenyl (DNP). Examples of immune modulators include but are not limited to, cytokines such as interleukins (e.g., IL-2, IL-3, IL-4, IL-5, IL-6, IL-7, IL-9, IL-10, IL-11, IL-12, IL-13, IL-15, IL-16, IL-17, IL-18, IL-1α, IL-1β, and IL-1 RA), granulocyte colony stimulating factor (G-CSF), granulocyte-macrophage colony stimulating factor (GM-CSF), oncostatin M (OSM), erythropoietin, leukemia inhibitory factor (LIF), interferons, B7.1 (also known as CD80), B7.2 (also known as B70, CD86), TNF family members (TNF-α, TNF-β, LT-β, CD40 ligand, Fas ligand, CD27 ligand, CD30 ligand, 4-1BBL, Trail), and MIF, interferon, cytokines such as IL-2 and IL-12; and chemotherapy agents such as methotrexate and chlorambucil.

[0930] The Examples show that the use various forms of heteromultimers and mixtures of heteromultimers and homomultimers in addition to existing therapeutics provide synergistic results.

### L. METHODS FOR IDENTIFYING, SCREENING AND CREATING PAN-HER THERAPEUTICS

[0931] In addition to ECD multimer compositions provided herein, other candidate pan-HER therapeutics can be identified, multimers produced, and compositions containing the mixtures of heteromultimers and homomultimers prepared for use as therapeutics.

[0932] Provided herein are methods to identify pan-HER therapeutics, and screening assays therefor. The methods are designed to identify molecules that target ECD subdomains to interfere with ligand binding and/or receptor dimerization and/or tethering by identifying molecules, such as small molecules and polypeptides, that interact with regions on more than one HER receptor family member that are involved in these activities. Such therapeutics can simultaneously target several members of the HER family who do not have multiple coexpression of HER receptors.

### 1. Targets for Pan-HER Therapeutics

[0933] To design such pan-HER therapeutic molecules, similar epitopes or conserved regions that are identified as having involvement in particular activities are identified. For example, regions involved in tethering are identified to screen for candidate molecules that stabilize or promote tethering; regions involved in ligand binding are identified to screen for candidates that interfere with ligand interaction with two or more HER family members, and regions involved in dimerization are identified.

[0934] The regions were and are identified based on the crystal structure data for the receptor family. For example, the design of antagonist therapeutics target aspects of the receptor that determine whether the receptor is in an inactive or active conformation, in order to preferentially target the activated receptor forms that make up about 5% of the HER family receptors on the cell surface. Examples of such structural components predicted by the crystal structure includes, for example, structural components that hold the receptors in a tethered or inactive state, structural components that facilitate dimerization, and or structural components that facilitate ligand binding. Each of these are described below as a potential target for the design of a pan-HER therapeutic.

[0935] For example, regions in subdomains II (D II) and IV (D IV) are involved in tethering and in receptor dimerization. Conserved regions can be identified to screen for candidate compounds that inhibit dimerization of more than one HER family member and/or that stabilize tethers or cross-link domains to stabilize the tethered conformation. Such identified polypeptides from several HER family members are exemplified in the Examples.

[0936] For this approach, homologous polypeptide sequences within each of the targeted structural regions were identified among each of the HER receptors (HER1, HER2, HER3, and HER4). In some examples, homologous regions in the IGF1-R, and other cell surface receptors, also can be aligned to identify potential target sequences. Typically, targeted sequences are derived by using amino acid sequences in one or more HER receptor (typically HER1 and/or HER3) and modeling from the crystal structure, followed by alignment of the identified sequences with other HER family receptors, and picking the most conserved sequences. Corresponding sequences in other HER receptors also are identified. Binding proteins to these targeted sequences can be identified such as, for example, using phage display. The binding proteins can be enriched to identify those that bind to one or more of these regions and 1) inhibit ligand binding, 2) inhibit association of receptors as dimers or heterodimers, and/or 3) inhibit the untethering reaction (i.e., activation of the HER molecule). In some instances, the affinity of the identified peptides can be increased by crosslinking of two or more peptides (i.e., creating peptide heterodimers) such that the crosslinked peptides bind to two regions of the same receptor molecule and prevent it from unfolding. The crosslinked peptides can be ones that recognize distinct epitopes in the same domain, or they can be ones that recognize distinct epitopes in different domains. For example, due to the proximity of domains II and IV in the tethered conformation of a HER receptors, a peptide that recognizes an epitope in domain II can be crosslinked to a peptide that recognizes an epitope in the domain IV tethering region to inhibit the untethering of the tethered conformation.

[0937] In one example, pan-HER therapeutic antagonists are designed to lock the receptor in an autoinhibited configuration by preventing dimerization. Thus, regions in domain II and/or regions in domain IV can be targeted. For example, regions in domain II in the dimerization arm, or regions surrounding the dimerization arm, can be targeted to prevent dimerization and association of HER family receptors. In another example, regions in domain IV can be targeted to prevent association of the dimerization arm with homologous regions in domain IV that occurs when the receptors are in a tethered confirmation. Thus, antagonists, such as peptides identified by phage display, or other molecules, such as antibody or other small molecule therapeutics can be identified that bind to distinct sites, for example on domain II of a single receptor, and thereby sterically inhibit its ability to dimerize. Targeted epitope regions that are conserved among HER family members based on alignment with HER3 in either of domain II or domain IV can be used as immunogens to generate antibodies to these regions, or can be used as target substrates to enrich for peptide binders to these sites using, for example, phage display technology. Example 8 describes the identification of exemplary homologous targeted epitope, which also are set forth in any of SEQ ID NOs:62-93 (domain II epitopes) or in any of SEQ ID NOs: 94-125 (domain IV epitopes). In addition, Example 5 describes an exemplary region in HER2 involved in dimerization (set forth in SEQ ID NO:405). Thus, for example, phage display can be used to identify peptides that bind to distinct sites in domain II and/or domain IV homologous regions that can separately bind to regions in domain II and or domain IV to hold the receptor in an autoinhibited configuration by inhibiting dimerization. Higher affinity peptide binders can be made by generating peptide heterodimers such as is described herein below. An advantage of this approach is that it targets the untethered form of the receptor, which accounts for only about 5% of HER receptors on the cell surface. Thus, the resulting therapeutic will target only a subpopulation of those receptors that are actively signaling, instead of the 95% of receptors on the cell surface that are tethered and inactive. This will increase the effective targeting of the receptor and reduce the dose of drug needed since the total number of targets is decreased by about 15 to 20-fold.

[0938] In another example, similar homologous regions on domain II and domain IV can be targeted to generate pan-HER therapeutic antagonists that stabilize the tethered confirmation of a HER receptor. Such therapeutics would target the inactive form of the HER receptors (i.e., about 95% of HER cell surface receptors), and prevent their ability to adopt an active conformation. The feasibility of this approach is supported by the crystal structure data, which demonstrates an intimate interaction between domain II and IV in the untethered or inactive form of HER receptors. The crystal structure of the ECD of HER1 and HER3 suggests that, before ligand stimulation, the receptors are held on the cell surface in an autoinhibited or tethered configuration. In this configuration, intramolecular-specific contacts between the dimerization arm in domain II and a homologous region in domain IV constrain the relative orientation of the two regions responsible for ligand binding (i.e., domains I and III) so they cannot both contact the ligand simultaneously. These structure features suggest that the ligand-dependent HER receptor activation can be prevented if the receptors can be locked in the autoinhibited, tethered configuration. The proximity of domain II and IV sequences predicts that the sequences can be cross-linked because of their close proximity. Thus, the same epitope regions in domains II and IV as described above and in Example 8, and set forth in any of SEQ ID NOs:62-93 (domain II epitopes) and in any of SEQ ID NOs:94-125 (domain IV epitopes), can be targeted. For this approach, peptide binders that are identified, such as for example by phage display methodologies, are selected that target homologous regions in both of domain II and domain IV of HER family receptors. If two peptides, one that binds domain II and the other that binds domain IV are heterodimerized, such as using methods described herein, the peptides can cross-link interdomain regions (e.g., stabilize the domain II and IV interaction) in tethered, inactive HER family members. Thus, the resultant antagonist molecule binds to the tethered form of the receptors, and “locks” the tethered form in place, thereby preventing formation of the high affinity, untethered, form of the receptor.

[0939] In an additional example, the ligand binding regions in domain I and III can be targeted by pan-HER therapeutics identified by methods described herein. As above, homologous targeted regions that participate in ligand binding can be identified between HER family receptors. For example, regions of HER1 that participate in ligand binding can be determined by the crystal structure of HER1 in complex with TGF-alpha (Garrett et al. (2002) Cell, 110: 763-773). The crystal structure can be retrieved from PDB protein data bank with 1D, 1MOX. Homologous regions in other HER family receptors can be determined by multiple alignment of HER1, HER2, HER3, and HER4. Example 7 describes regions identified by such an alignment, and aligned sequences are set forth in any of SEQ ID NOs:54-61. These sequences can be targeted by, for example, combinatorial peptide libraries, phage display technology, or by the multiclonal approach (see e.g., Haurum and Bregenholt (2005) IDrugs, 8:404-409). A pan-HER therapeutic identified by such approaches would be expected to inhibit binding of diverse ligands to multiple HER receptors, by blocking sites, such as through steric inhibition, in domains I and/or III. Such a therapeutic would target inactive HER receptors, and inhibit their ability to adopt an active conformation, which occurs only after binding of ligand.

### 2. Screening Methods to Identify Pan-HER Therapeutics

[0940] Provided herein are methods to identify pan-HER therapeutics that target more than one HER family receptor. Collections of molecules are screened. Such collections, include, for example, small organic compounds and other biomolecules including peptides, saccharides, fatty acids, steroids, purines, pyrimidines, derivatives, structural analogs, or combinations thereof. In one example, the collections are screened against the identified polypeptides that are conserved among the receptor family and that participate in a particular activity.

[0941] The identified polypeptides also can be screened by any of a variety of methods for screening libraries of molecules to identify those that interact with the identified polypeptides. For example, candidate pan-HER therapeutics can be identified by phage display-derived peptides. Such peptides will be enriched to identify those that bind to the sequence elements conserved among the HER receptor family as discussed above (i.e., any one or more of the peptide epitopes set forth in any of SEQ ID NOs: 54-125, or 405).

a. Phage Display

[0942] Phage display technology, which is well established, involves producing libraries or peptides displayed on the phage. These can contain, for example, as many as 10¹⁰ different peptides, thus surpassing many combinatorial small-molecule libraries. The interaction of peptides (often 7-20 amino acids or more) with protein targets can be highly specific, sometimes more so than small molecules. Peptides can be modified to enhance their therapeutic efficacy. For example, brief serum residence and rapid renal filtration can be reduced by PEGylation or fusion with other serum proteins such as albumin. PEGylation not only increases serum residence but also can reduce immunogenicity. In addition, the affinity of peptides for protein targets can be improved by linking two or more synergistic, nonoverlapping peptides to form high affinity heterodimer binders.

[0943] The phage display and other such methods can be used in different ways. First, the polypeptides identified here can be screened against a library of displayed polypeptides to identify those polypeptides in the libraries that can be candidate pan-HER therapeutics. Alternatively, the peptides identified herein, can be displayed, and screened against libraries of small molecules and other polypeptides to identify pan-HER therapeutic candidates.

i. Peptide Libraries

[0944] Peptide libraries produced and screened in methods provided herein are useful in providing new ligands for HER family receptors and in producing pan-HER therapeutics. Peptide libraries can be designed and panned according to methods described in detail herein, and methods generally available to those in the art (see e.g., U.S. Pat. No. 5,723,286 and U.S. Patent Application No. US20040023887). In one aspect, commercially available phage display libraries can be used (e.g., RAPIDLIB® or GRABLIB®, DGI BioTechnologies, Inc., Edison, N.J.; C7C Disulfide Constrained Peptide Library or 7-aa and 12-aa linear libraries, New England Biolabs). In another aspect, an oligonucleotide library can be prepared according to methods known in the art, and inserted into an appropriate vector for peptide expression. For example, vectors encoding a bacteriophage structural protein, preferably an accessible phage protein, such as a bacteriophage coat protein, can be used. Although one skilled in the art will appreciate that a variety of bacteriophage can be employed, typically the vector is, or is derived from, a filamentous bacteriophage, such as, for example, fl, fd, Pfl, M13, and others. In particular, the fd-tet vector has been extensively described in the literature (see, e.g., Zacher et al., (1980) Gene 9:127-140; Smith et al., (1985), Science 228:1315-1317; Parmley and Smith (1988) Gene, 73:305-318).

[0945] The phage vector is chosen to contain or is constructed to contain a cloning site located in the 5′ region of the gene encoding the bacteriophage structural protein, so that the peptide is accessible to receptors in an affinity enrichment procedure as described herein below. The structural phage protein is generally a coat protein. An example of an appropriate coat protein is pill. A suitable vector can allow oriented cloning of the oligonucleotide sequences that encode the peptide so that the peptide is expressed at or within a distance of about 100 amino acid residues of the N-terminus of the mature coat protein. The coat protein is typically expressed as a preprotein, having a leader sequence.

[0946] Typically, the oligonucleotide library is inserted so that the N-terminus of the processed bacteriophage outer protein is the first residue of the peptide, i.e., between the 3′-terminus of the sequence encoding the leader protein and the 5′-terminus of the sequence encoding the mature protein or a portion of the 5′ terminus. The library is constructed by cloning an oligonucleotide which contains the variable region of library members (and any spacers, as discussed below) into the selected cloning site. Using known recombinant DNA techniques (see generally, Sambrook et al., (1989) Molecular Cloning, A Laboratory Manual, 2d ed., Cold Spring Harbor Laboratory Press, Cold Spring Harbor, N.Y.) an oligonucleotide can be constructed which 1) removes unwanted restriction sites and adds desired ones; 2) reconstructs the correct portions of any sequences which have been removed (such as a correct signal peptidase site, for example), 3) inserts the spacer residues, if any; and/or 4) corrects the translation frame, if necessary, to produce active, infective phage.

[0947] The central portion of the oligonucleotide will generally contain one or more HER family receptor epitope binding sequences and, optionally, spacer sequences. The sequences are ultimately expressed as peptides (with or without spacers) fused to or in the N-terminus of the mature coat protein on the outer, accessible surface of the assembled bacteriophage particles. The size of the library will vary according to the number of variable codons, and hence the size of the peptides, which are desired. Generally, the library will be at least about 10⁶ members, usually at least 10⁷, and typically 10⁸ or more members. To generate the collection of oligonucleotides which forms a series of codons encoding a random collection of amino acids and which is ultimately cloned into the vector, a codon motif is used, such as (NNK)ₓ, where N may be A, C, G, or T (nominally equimolar), K is G or T (nominally equimolar), and x is typically up to about 5, 6, 7, 8, or more, thereby producing libraries of penta-, hexa-, hepta-, and octa-peptides or larger. The third position may also be G or C, designated “S”. Thus, NNK or NNS, 1) code for all the amino acids; 2) code for only one stop codon; and 3) reduce the range of codon bias from 6:1 to 3:1.

[0948] It should be understood that, with longer peptides, the size of the library that is generated can become a constraint in the cloning process. The expression of peptides from randomly generated mixtures of oligonucleotides in appropriate recombinant vectors is known in the art (see, e.g., Oliphant et al., Gene 44:177-183). For example, the codon motif (NNK)₆ produces 32 codons, one for each of 12 amino acids, two for each of five amino acids, three for each-of three amino acids and one (amber) stop codon. Although this motif produces a codon distribution as equitable as available with standard methods of oligonucleotide synthesis, it results in a bias against peptides containing one-codon residues. In particular, a complete collection of hexacodons contains one sequence encoding each peptide made up of only one-codon amino acids, but contains 729 (36) sequences encoding each peptide with only three-codon amino acids.

[0949] An alternative approach to minimize the bias against one-codon residues involves the synthesis of 20 activated trinucleotides, each representing the codon for one of the 20 genetically encoded amino acids. These are synthesized by conventional means, removed from the support while maintaining the base and 5-OH-protecting groups, and activated by the addition of 3′O-phosphoramidite (and phosphate protection with b-cyanoethyl groups) by the method used for the activation of mononucleosides (see, generally, McBride and Caruthers, 1983, Tetrahedron Letters 22:245). Degenerate oligocodons are prepared using these trimers as building blocks. The trimers are mixed at the desired molar ratios and installed in the synthesizer. The ratios will usually be approximately equimolar, but can be a controlled unequal ratio to obtain the over- to under-representation of certain amino acids coded for by the degenerate oligonucleotide collection. The condensation of the trimers to form the oligo-codons is done essentially as described for conventional synthesis employing activated mononucleosides as building blocks (see, e.g., Atkinson and Smith, 1984, Oligonucleotide Synthesis, M. J. Gait, Ed., p. 35-82). This procedure generates a population of oligonucleotides for cloning that is capable of encoding an equal distribution (or a controlled unequal distribution) of the possible peptide sequences. Advantageously, this approach can be employed in generating longer peptide sequences, since the range of bias produced by the (NNK)₆ motif increases by three-fold with each additional amino acid residue.

[0950] When the codon motif is (NNK)ₓ, as defined above, and when x equals 8, there are 2.6×10¹⁰ possible octa-peptides. A library containing most of the octa-peptides can be difficult to produce. Thus, a sampling of the octa-peptides can be accomplished by constructing a subset library using up to about 10% of the possible sequences, which subset of recombinant bacteriophage particles is then screened. If desired, to extend the diversity of a subset library, the recovered phage subset may be subjected to mutagenesis and then subjected to subsequent rounds of screening. This mutagenesis step can be accomplished in two general ways: the variable region of the recovered phage can be mutagenized, or additional variable amino acids can be added to the regions adjoining the initial variable sequences.

[0951] To diversify around active peptides (i.e., binders) found in early rounds of panning, the positive phage can be sequenced to determine the identity of the active peptides. Oligonucleotides can then be synthesized based on these peptide sequences. The syntheses are done with a low level of all bases incorporated at each step to produce slight variations of the primary oligonucleotide sequences. This mixture of (slightly) degenerate oligonucleotides can then be cloned into the affinity phage by methods known to those in the art. This method produces systematic, controlled variations of the starting peptide sequences as part of a secondary library. It requires, however, that individual positive phage be sequenced before mutagenesis, and thus is useful for expanding the diversity of small numbers of recovered phage.

[0952] An alternate approach to diversify the selected phage allows the mutagenesis of a pool, or subset, of recovered phage. In accordance with this approach, phage recovered from panning are pooled and single stranded DNA is isolated. The DNA is mutagenized by treatment with, e.g., nitrous acid, formic acid, or hydrazine. These treatments produce a variety of damage to the DNA. The damaged DNA is then copied with reverse transcriptase, which misincorporates bases when it encounters a site of damage. The segment containing the sequence encoding the receptor-binding peptide is then isolated by cutting with restriction nuclease(s) specific for sites flanking the peptide coding sequence. This mutagenized segment is then recloned into undamaged vector DNA, the DNA is transformed into cells, and a secondary library is generated according to known methods. General mutagenesis methods are known in the art (see e.g., Myers et al., 1985, Nucl. Acids Res. 13:3131-3145; Myers et al., 1985, Science 229:242-246; Myers, 1989, Current Protocols in Molecular Biology Vol. I, 8.3.1-8.3.6, F. Ausubel et al., eds, J. Wiley and Sons, New York).

[0953] In another general approach, the addition of amino acids to a peptide or peptides found to be active, can be carried out using various methods. In one, the sequences of peptides selected in early panning are determined individually and new oligonucleotides, incorporating the determined sequence and an adjoining degenerate sequence, are synthesized. These are then cloned to produce a secondary library. Alternatively, methods can be used to add a second HER binding sequence to a pool of peptide-bearing phage. In accordance with one method, a restriction site is installed next to the first HER binding sequence. Preferably, the enzyme should cut outside of its recognition sequence. The recognition site can be placed several bases from the first binding sequence. To insert a second HER binding sequence, the pool of phage DNA is digested and blunt-ended by filling in the overhang with Klenow fragment. Double-stranded, blunt-ended, degenerately synthesized oligonucleotides are then ligated into this site to produce a second binding sequence juxtaposed to the first binding sequence. This secondary library is then amplified and screened as before.

[0954] While in some instances it is appropriate to synthesize longer peptides to bind certain receptors, in other cases it is desirable to provide peptides having two or more HER binding sequences separated by spacer (e.g., linker) residues. For example, the binding sequences can be separated by spacers that allow the regions of the peptides to be presented to the receptor in different ways. The distance between binding regions can be as little as 1 residue, or at least 2-20 residues, or up to at least 100 residues. Preferred spacers are 3, 6, 9, 12, 15, or 18 residues in length. For probing large binding sites or tandem binding sites (e.g., epitopes on domain II and epitopes on domain IV), the binding regions can be separated by a spacer of residues of up to to 30 amino acids. The number of spacer residues when present will typically be at least 2 residues, and often will be less than 20 residues.

[0955] The oligonucleotide library can have binding sequences which are separated by spacers (e.g., linkers), and thus can be represented by the formula: (NNK)_{y}.(abc)ₙ-(NNK)_{z}, where N and K are as defined previously (note that S as defined previously may be substituted for K), and y+z is equal to about 5, 6, 7, 8, or more, a, b and c represent the same or different nucleotides comprising a codon encoding spacer amino acids, n is up to about 3, 6, 9, or 12 amino acids, or more. The spacer residues may be somewhat flexible, comprising oligo-glycine, or oligo-glycine-glycine-serine, for example, to provide the diversity domains of the library with the ability to interact with sites in a large binding site relatively unconstrained by attachment to the phage protein. Rigid spacers, such as, e.g., oligo-proline, can also be inserted separately or in combination with other spacers, including glycine spacers. It may be desired to have the HER binding sequences close to one another and use a spacer to orient the binding sequences with respect to each other, such as by employing a turn between the two sequences, as might be provided by a spacer of the sequence glycine-proline-glycine, for example. To add stability to such a turn, it may be desirable or necessary to add cysteine residues at either or both ends of each variable region. The cysteine residues would then form disulfide bridges to hold the variable regions together in a loop, and in this fashion can also serve to mimic a cyclic peptide. Of course, those skilled in the art will appreciate that various other types of covalent linkages for cyclization can also be used.

[0956] Spacer residues as described above can also be situated on either or both ends of the HER binding sequences. For instance, a cyclic peptide can be designed without an intervening spacer, by having a cysteine residue on both ends of the peptide. As described above, flexible spacers, e.g., oligo-glycine, can facilitate interaction of the peptide with the selected receptors. Alternatively, rigid spacers can allow the peptide to be presented as if on the end of a rigid arm, where the number of residues, e.g., proline residues, determines not only the length of the arm but also the direction for the arm in which the peptide is oriented. Hydrophilic spacers, made up of charged and/or uncharged hydrophilic amino acids, (e.g., Thr, His, Asn, Gln, Arg, Glu, Asp, Met, Lys), or hydrophobic spacers of hydrophobic amino acids (e.g., Phe, Leu, Ile, Gly, Val, Ala) can be used to present the peptides to receptor binding sites with a variety of local environments.

[0957] Some peptides, because of their size and/or sequence, can cause severe defects in the infectivity of their carrier phage. This causes a loss of phage from the population during reinfection and amplification following each cycle of panning. To minimize problems associated with defective infectivity, DNA prepared from the eluted phage can be transformed into appropriate host cells, such as, e.g., E. coli, preferably by electroporation (see, e.g., Dower et al., Nucl. Acids Res. 16:6127-6145), or well-known chemical means. The cells are cultivated for a period of time sufficient for marker expression, and selection is applied as typically done for DNA transformation. The colonies are amplified, and phage harvested for affinity enrichment in accordance with established methods. Phage identified in the affinity enrichment can be re-amplified by infection into the host cells. The successful transformants are selected by growth in an appropriate antibiotic(s), e.g., tetracycline or ampicillin. This can be done on solid or in liquid growth medium.

[0958] For growth on solid medium, the cells are grown at a high density (about 10⁸ to 10⁹ transformants per m²) on a large surface of, for example, L-agar containing the selective antibiotic to form essentially a confluent lawn. The cells and extruded phage are scraped from the surface and phage are prepared for the first round of panning (see, e.g., Parmley and Smith, 1988, Gene 73:305-318). For growth in liquid culture, cells can be grown in L-broth and antibiotic through about 10 or more doublings. The phage are harvested by standard procedures (see Sambrook et al., 1989, Molecular Cloning, 2nd ed.). Growth in liquid culture can be more convenient because of the size of the libraries, while growth on solid media can provide less chance of bias during the amplification process.

[0959] For affinity enrichment of desired clones, generally about 10³ to 10⁴ library equivalents (a library equivalent is one of each recombinant; 10⁴ equivalents of a library of 10⁹ members is 10⁹×10⁴=10¹³ phage), but typically at least 10² library equivalents, up to about 10⁵ to 10⁶, are incubated with a receptor (or portion thereof) to which the desired peptide is sought. The receptor is in one of several forms appropriate for affinity enrichment schemes. In one example the receptor is immobilized on a surface or particle, and the library of phage bearing peptides is then panned on the immobilized receptor generally according to procedures known in the art. For example, the receptor can be expressed on the cell surface of a monolayer of cells (such as due to transfection, or utilizing a cell that naturally expresses the appropriate receptor). Additionally, the ECD portion of a HER molecule can be linked to an Fc domain and selection can be performed against a HER-Fc complex immobilized to protein A agarose. In such an example, a phage display library can be depleted against an irrelevant Fc fusion protein-protein A (or G) agarose complex. In an alternate scheme, a receptor is attached to a recognizable ligand (which can be attached via a tether). A specific example of such a ligand is biotin. The receptor, so modified, is incubated with the library of phage and binding occurs with both reactants in solution. The resulting complexes are then bound to streptavidin or avidin through the biotin moiety. The streptavidin can be immobilized on a surface such as a plastic plate or on particles, in which case the complexes (phage/peptide/receptor/biotin/streptavidin) are physically retained; or the streptavidin can be labeled, with a fluorophore, for example, to tag the active phage/peptide for detection and/or isolation by sorting procedures, e.g., on a fluorescence-activated cell sorter.

[0960] Enrichment of binding phage can be facilitated by subsequent pannings against more specified targets, for example, epitope regions identified in any of subdomains I-IV. Thus, for example, positive phage clones can be screened further against individual synthetic peptides, depending on the targeted subdomain of the HER molecule, such as for example any one or more set forth in any of SEQ ID NOs: 54-61 (subdomains I and III), any of SEQ ID NOs: 62-93 (subdomain II), and/or any of SEQ ID NOs: 94-125, or 405 (subdomain IV). The phage can be enriched against individual peptides set forth in any of SEQ ID NOs:54-125, or 405. Such an enrichment will allow for the determination of the phage binding sites on a HER family receptor. To identify those molecules that are pan-HER therapeutics subsequent screenings also can be performed on other HER family receptors, i.e., HER-Fc-protein A agarose complexes or a monolayer of cells expressing other HER receptors, to identify those molecules that bind to more than one HER family receptor.

[0961] At each step, phage that associate with a HER family receptor via non-specific interactions are removed by washing. The degree and stringency of washing required will be determined for each receptor/peptide of interest. A certain degree of control can be exerted over the binding characteristics of the peptides recovered by adjusting the conditions of the binding incubation and the subsequent washing. The temperature, pH, ionic strength, divalent cation concentration, and the volume and duration of the washing will select for peptides within particular ranges of affinity for the receptor. Selection based on slow dissociation rate, which is usually predictive of high affinity, is the most practical route. This can be done either by continued incubation in the presence of a saturating amount of free ligand, or by increasing the volume, number, and length of the washes. In each case, the rebinding of dissociated peptide-phage is prevented, and with increasing time, peptide-phage of higher and higher affinity are recovered. Additional modifications of the binding and washing procedures can be applied to find peptides that bind receptors under special conditions. Once a peptide sequence that imparts some affinity and specificity for the receptor molecule is known, the diversity around this binding motif can be embellished. For instance, variable peptide regions can be placed on one or both ends of the identified sequence. The known sequence can be identified from the literature, or can be derived from early rounds of panning.

ii. Multimeric Polypeptides (Heterodimeric Peptides)

[0962] Most methods for preparing the multimeric polypeptides result in mixtures of species that include the multimeric polypeptides, and also homomeric polypeptides. For purposes herein, the mixture of polypeptides is the therapeutic product. The mixture of species is more effective as a therapeutic than an isolated multimeric single species product.

[0963] Multimeric polypeptides (ligands) can be prepared by covalently linking amino acid sequences of two or more identified binding peptides, such as identified using phage display technology. Depending on the purpose intended for the multivalent ligand, polypeptides that bind to the same or different domain sites on a HER molecule can be combined to form a single molecule. Where the multivalent ligand is constructed to bind to the same or corresponding site on different receptors, or different subdomains of a receptor, the amino acid sequences of the peptide ligand for binding to the receptors can be the same or different, provided that if different amino acid sequences are used, they both bind to the same site. Other cell surface-specific polypeptides similarly can be prepared.

[0964] Multivalent polypeptides can be prepared by either expressing amino acid sequences which bind to the individual sites separately and then covalently linking them together, or by expressing the multivalent ligand as a single amino acid sequence which contains within it the combination of specific amino acid sequences for binding. Combining amino acid polypeptides that bind to distinct sites within a subdomain or between subdomains can be used to produce molecules that are higher affinity peptide ligands or that are capable of crosslinking together different subdomains on a HER receptor.

[0965] Whether produced by recombinant gene expression or by conventional linkage technology, the various polypeptides can be coupled through linkers of various length. Where linked sequences are expressed recombinantly, and based on an average amino acid length of about 4 angstroms, the linkers for connecting the two amino acid sequences typically range from about 3 to about 12 amino acids. The degree of flexibility of the linker between the amino acid sequences can be modulated by the choice of amino acids used to construct the linker. The combination of glycine and serine is useful for producing a flexible, relatively unrestrictive linker. A more rigid linker can be constructed using amino acids with more complex side chains within the linkage sequence.

[0966] In one example, preparation of multimeric constructs includes one or more binding peptides. For example, peptides identified by phage display as binding to a target are biotinylated and complexed with avidin, streptavidin, ore neutravidin to form tetrameric constructs. These tetrameric constructs are then incubated with a target, or portion thereof, such as, for example, a cell that expresses the desired HER target and cells that do not, and subsequent binding of the tetrameric construct is detected. Binding can be detected using any method of detection known in the art. For example, to detect binding the avidin, streptavidin, or neutravidin can be conjugated to a detectable marker (e.g., a radioactive label, a fluorescent label, or an enzymatic label that undergoes a color change, such as HRP (horse radish peroxidase), TMB (tetramethyl benzidine), or alkaline phosphatase). The multimeric complexes optionally can be screened in the presence of serum. Thus, the assay can also be used to rapidly evaluate the effect of serum on the binding of peptides to the target.

[0967] The biotinylated peptides are preferably complexed with neutravidin-RP. Neutravidin exhibits lower non-specific binding to molecules than the other alternatives due to the absence of lectin binding carbohydrate moieties and cell adhesion receptor-binding RYD domain in neutravidin (see e.g., Hiller et al. (1987) Biochem J. 248: 167-171; Alon et al. (1990) Biochem. Biophys. Res. Commum., 170:236-41).

[0968] The use of biotin/avidin complexes allows for relatively easy preparation of tetrameric constructs containing one to four different binding peptides. In addition, the affinity and avidity of a targeting construct can be increased by including two or more targeting moieties that bind to different epitopes on the same target. The screening assays described herein can be useful in identifying combinations of binding polypeptides that have increased affinity and/or crosslink distinct subdomains (i.e., to stabilize the tethered conformation) when included in such multimeric constructs.

b. Computer-Aided Optimization

[0969] Another method that can be used for identifying pharmacologically active pan-HER therapeutic molecules is to use computer-aided optimization techniques to sort through the possible mutations that result in higher affinity binding to the ligand(s). The Examples provide guidance on how such computer-aided optimization techniques can be used. For examples, HER1, HER2, HER3 or HER4 with enhanced binding to ligands may be generated this way and used as components to make heteromultimers, homomultimers and mixtures of both.

c. Exemplary Screening Assays

[0970] Also provided herein are screening assays to identify pharmacologically active pan-HER therapeutic molecules. Pan cell surface-specific molecules similarly can be identified using known assays for particular cell surface receptor activities.

[0971] Pan-therapeutic molecules include, for example, 1) peptides such as soluble peptides, including Ig-tailed fusion peptides and members of random peptide libraries (see, e.g., Lam et al., 1991, Nature 354:82-84; Houghten et al., 1991, Nature 354:84-86) and combinatorial chemistry-derived molecular libraries made of D- and/or L-configuration amino acids; 2) phosphopeptides (e.g., members of random and partially degenerate, directed phosphopeptide libraries, see, e.g., Songyang et al., 1993, Cell 72:767-778); 3) antibodies (e.g., polyclonal, monoclonal, humanized, anti-idiotypic, chimeric, and single chain antibodies as well as Fab, F(ab′)₂, Fab expression library fragments, and epitope-binding fragments of antibodies); and 4) small organic and inorganic molecules. Exemplary molecules are peptide ligands identified from phage display methodologies, such as is described herein above.

[0972] Test molecules also can encompass numerous chemical classes, though typically they are organic molecules, preferably small organic compounds having a molecular weight of more than 50 and less than about 2,500 Daltons. Such molecules can comprise functional groups necessary for structural interaction with proteins, particularly hydrogen bonding, and typically include at least an amine, carbonyl, hydroxyl, or carboxyl group, preferably at least two of the functional chemical groups. Molecules often comprise cyclical carbon or heterocyclic structures and/or aromatic or polyaromatic structures substituted with one or more of the above functional groups. Molecules can be obtained from a wide variety of sources including libraries of synthetic or natural compounds. Synthetic compound libraries are commercially available from, for example, Maybridge Chemical Co. (Trevillet, Cornwall, UK), Comgenex (Princeton, N.J.), Brandon Associates (Merrimack, N.H.), and Microsource (New Milford, Conn.). A rare chemical library is available from Aldrich Chemical Company, Inc. (Milwaukee, Wis.). Natural compound libraries comprising bacterial, fungal, plant or animal extracts are available from, for example, Pan Laboratories (Bothell, Wash.). In addition, numerous means are available for random and directed synthesis of a wide variety of organic compounds and biomolecules, including expression of randomized oligonucleotides.

[0973] Alternatively, libraries of natural compounds in the form of bacterial, fungal, plant and animal extracts can be readily produced. Methods for the synthesis of molecular libraries are readily available (see, e.g., DeWitt et al., 1993, Proc. Natl. Acad Sci. USA 90:6909; Erb et al., 1994, Proc. Natl. Acad Sci. USA 91:11422; Zuckermann et al., 1994, J. Med Chem. 37:2678; Cho et al., 1993, Science 261:1303; Carell et al., 1994, Angew. Chem. Int. Ed Engl. 33:2059; Carell et al., 1994, Angew. Chem. Int. Ed Engl. 33:2061; and in Gallop et al., 1994, J. Med Chem. 37:1233). In addition, natural or synthetic compound libraries and compounds can be readily modified through conventional chemical, physical and biochemical means (see, e.g., Blondelle et al., 1996, Trends in Biotech. 14:60), and can be used to produce combinatorial libraries. In another approach, previously identified pharmacological agents can be subjected to directed or random chemical modifications, such as acylation, alkylation, esterification, amidification, and the analogs can be screened for HER-modulating activity.

[0974] Numerous methods for producing combinatorial libraries are known in the art, including those involving biological libraries; spatially addressable parallel solid phase or solution phase libraries; synthetic library methods requiring deconvolution; the ‘one-bead one-compound’ library method; and synthetic library methods using affinity chromatography selection. The biological library approach is limited to polypeptide or peptide libraries, while the other four approaches are applicable to polypeptide, peptide, non-peptide oligomer, or small molecule libraries of compounds (K. S. Lam, 1997, Anticancer Drug Des. 12:145).

[0975] Libraries can be screened in solution by methods generally known in the art for determining whether ligands competitively bind at a common binding site. Such methods can include screening libraries in solution (e.g., Houghten, 1992, Biotechniques 13:412-421), or on beads (Lam, 1991, Nature 354:82-84), chips (Fodor, 1993, Nature 364:555-556), bacteria or spores (Ladner U.S. Pat. No. 5,223,409), plasmids (Cull et al., 1992, Proc. Natd. Acad Sci. USA 89:1865-1869), or on phage (Scott and Smith, 1990, Science 249:386-390; Devlin, 1990, Science 249:404-406; Cwirla et al., 1990, Proc. Nat. Acad Sci. USA 97:6378-6382; Felici, 1991, J. Mol. Biol. 222:301-310; Ladner, supra). Any one of the libraries, including any test molecules thereof, can be contacted with all or a portion of a HER molecule, such as any portion of a HER epitope region identified in subdomain I, II, III, or IV and set forth in any of SEQ ID NOs:54-125, and interaction of the test molecule with a HER ECD, or portion thereof, can be assessed. Candidate pan-HER therapeutics can be identified that display interaction with at least one or more of the epitope regions. Such pan-HER therapeutics also will display interaction with at least one or more full-length HER molecule, or ECD portion thereof, typically at least two, or at least three HER molecules.

[0976] Where the screening assay is a binding assay, all, or a portion of a HER, or all or a portion of a HER ECD thereof such as any one of the peptide epitopes set forth in SEQ ID NOs:54-125 and 405, or a test molecule, can be joined to a label, where the label can directly or indirectly provide a detectable signal. Various labels include radioisotopes, fluorescent molecules, chemiluminescent molecules, enzymes, specific binding molecules, particles, e.g., magnetic particles, and the like. Specific binding molecules include pairs, such as biotin and streptavidin, digoxin and antidigoxin, and others. For the specific binding members, the complementary member would normally be labeled with a molecule that provides for detection, in accordance with known procedures. A variety of other reagents can be included in the screening assay. These include reagents like salts, neutral proteins, e.g., albumin, detergents, and others, which are used to facilitate optimal protein-protein binding and/or reduce non-specific or background interactions. Reagents that improve the efficiency of the assay, such as protease inhibitors, nuclease inhibitors, or anti-microbial agents, can be used. The components are added in any order that produces the requisite binding. Incubations are performed at any temperature that facilitates optimal activity, typically between 4° C. and 40° C. Incubation periods are selected for optimum activity, but can also be optimized to facilitate rapid high-throughput screening. Normally, between 0.1 and 1 h will be sufficient. In general, a plurality of assay mixtures is run in parallel with different test agent concentrations to obtain a differential response to these concentrations. Typically, one of these concentrations serves as a negative control, i.e., at zero concentration or below the level of detection.

[0977] In one example, phage display libraries can be screened for ligands that bind to HER receptor molecules, or portions thereof, as described above. Details of the construction and analyses of these libraries, as well as the basic procedures for biopanning and selection of binders, have been published (see, e.g., WO 96/04557; Mandecki et al., 1997, Display Technologies—Novel Targets and Strategies, P. Guttry (ed), International Business Communications, Inc. Southborough, Mass., pp. 231-254; Ravera et al., 1998, Oncogene 16:1993-1999; Scott and Smith, 1990, Science 249:386-390); Grihalde et al., 1995, Gene 166:187-195; Chen et al., 1996, Proc. Natl. Acad. Sci. USA 93:1997-2001; Kay et al., 1993, Gene 128:59-65; Carcamo et al., 1998, Proc. Natd. Acad. Sci. USA 95:11146-11151; Hoogenboom, 1997, Trends Biotechnol. 15:62-70; Rader and Barbas, 1997, Curr. Opin. Biotechnol. 8:503-508; all of which are incorporated herein by reference).

[0978] The designing of mimetics to a known pharmaceutically active compound is an approach to the development of pharmaceuticals based on a “lead” compound. This might be desirable where the active compound is difficult or expensive to synthesize or where it is unsuitable for a particular method of administration, e.g., peptides are generally unsuitable active agents for oral compositions as they tend to be quickly degraded by proteases in the alimentary canal. Mimetic design, synthesis, and testing are generally used to avoid large-scale screening of molecules for a target property.

[0979] There are several steps commonly taken in the design of a mimetic from a compound having a given target property. First, the particular parts of the compound that are critical and/or important in determining the target property are determined. In the case of a peptide, this can be done by systematically varying the amino acid residues in the peptide (e.g., by substituting each residue in turn). These parts or residues constituting the active region of the compound are known as its “pharmacophore.”

[0980] Once the pharmacophore has been found, its structure is modeled according to its physical properties (e.g., stereochemistry, bonding, size, and/or charge), using data from a range of sources (e.g., spectroscopic techniques, X-ray diffraction data, and NMR). Computational analysis, similarity mapping (which models the charge and/or volume of a pharmacophore, rather than the bonding between atoms), and other techniques can be used in this modeling process. In a variant of this approach, the three-dimensional structure of the ligand and its binding partner are modeled. This can be especially useful where the ligand and/or binding partner change conformation on binding, allowing the model to take account of this in the design of the mimetic. A template molecule is then selected, and chemical groups that mimic the pharmacophore can be grafted onto the template. The template molecule and the chemical groups grafted on to it can conveniently be selected so that the mimetic is easy to synthesize, it will be pharmacologically acceptable, does not degrade in vivo, and retains the biological activity of the lead compound. The mimetics found are then screened to ascertain the extent they exhibit the target property, or to what extent they inhibit it. Further optimization or modification can then be carried out to arrive at one or more final mimetics for in vivo or clinical testing.

[0981] Pan-HER therapeutics identified in the methods described above can be tested for their ability to functionally modulate one or more HER activity. Such activities are known to those of skill in the art and are described herein above in Section G. Exemplary of such assays include ligand binding, cell proliferation, cell phosphorylation, and complexation/dimerization. Thus, any candidate pan-HER therapeutic identified herein as a candidate based on high affinity binding to a HER molecule or portion thereof, can be tested in further screening assays to determine if the candidate therapeutic possesses pan-HER therapeutic properties, i.e., inhibitory properties against HER activation. For example, a pan-HER therapeutic that targets the dimerization arm in domain II optimally would inhibit the ability of a HER molecule to dimerize with itself or with other HER family molecules. Similarly, in the absence of dimerization such a candidate therapeutic also would be expected to inhibit the ability of a HER molecule to induce cell phosphorylation or cell proliferation when stimulated with the appropriate ligand. In another example, a pan-HER therapeutic that acts to stabilize the tether by, for example, crosslinking domains II and IV, would inhibit the ability of a HER molecule to transition to an activated state. Thus, such a candidate pan-HER therapeutic could be tested for its ability to modulate, typically inhibit, dimerization, or cell activation as assessed by cell proliferation of cell phosphorylation stimulated in the presence of ligand. In an additional example, a candidate pan-HER therapeutic could be tested for its ability to inhibit ligand binding by assaying for binding to any one or more HER family of ligands, including but not limited to EGF, amphiregulin, TGF-alpha, or any one of the neuregulins (i.e., HRGβ). Identified pan-HER therapeutics will modulate, typically inhibit, one or more of the above HER-mediated activities for at least two HER receptors.

### M. EXAMPLES

[0982] The following examples are included for illustrative purposes only and are not intended to limit the scope of the invention.

### Example 1

### Cloning of HER Extracellular Domains

Various HER derivatives containing all or part of the extracellular domain of a HER molecule were cloned and expressed.

### A. Cloning HER ECD Derivatives

[0983] HER1-621 (SEQ ID NO:12) was cloned as follows: the extracellular domain (amino acids 1-621 of the amino acid sequence of the full-length HER1 receptor (obtained from Gail Clinton; SEQ ID NO: 2)) was PCR amplified and subcloned into pcDNA3.1 Myc-His vector (Invitrogen; see also SEQ ID NO: 161 for sequence of a pcDNA3.1 Myc-His) via KpnI-Xho1 restriction sites to generate pcDNA/HER1-621-myc-His vector.

[0984] HER3-621 (SEQ ID NO:26) was cloned as follows: the extracellular domain (amino acids 1-621 of the amino acid sequence of the full length HER3 receptor (see, SEQ ID NO:6) was PCR amplified and subcloned into pcDNA 3.1 Myc-His vector via KpnI-XbaI restriction sites to generate a vector designated pcDNA/HER3-621-myc-His vector.

[0985] Additional ECD derivatives were cloned. Their designations and respective encoding nucleic acid and encoded amino sequence identifiers are set forth in the following Table:

TABLE 15
HER ECD derivatives

| | | | | | | SEQ | |
|---|---|---|---|---|---|---|---|
| Her | | | | AA to | Novel | ID NO. | |
| Family | Name | Synonym | Type | 501 | AA | nt. | AA |
| EGFR | HF110 | HER1-501 | 501 | 0 | | 9 | 10 |
| (HER1) | HF100 | HER1-621 | 501(+) | 120 | | 11 | 12 |
| HER2 | HF220 | HER2-530 | 501 | 0 | | 13 | 14 |
| | HF210 | HER2-595 | 501(+) | 65 | | 15 | 16 |
| | HF200 | HER2-650 | 501(+) | 120 | | 17 | 18 |
| HER3 | HF310 | HER3-500 | 501 | 0 | | 19 | 20 |
| | | P85HER3 | 501(+) | 18 | 25 | 21 | 22 |
| | | HER3-519 | 501(+) | 19 | | 23 | 24 |
| | HF300 | HER3-621 | 501(+) | 121 | | 25 | 26 |
| HER4 | HF410 | HER4-485 | 501(−) | −37 | | 27 | 28 |
| | | HER4-522 | 501 | 0 | | 29 | 30 |
| | HF400 | HER4-650 | 501(+) | 128 | | 31 | 32 |
| ERRP | HF120 | ERRP | 501(−) | −77 | 30 | 33 | 34 |
| | | tPA-ERRP | 501(−) | −77 | 30 | 35 | 36 |

[0986] FIGS. 2(A)-2(D) set forth alignments of each of these cloned isoforms with their respective cognate receptors.

### B. Protein Expression and Secretion

[0987] To express the HER ECD derivatives in human cells, human embryonic kidney 293T cells were seeded at 2×10⁶ cells/well in a 6-well plate and maintained in Dulbecco's modified Eagle's medium (DMEM) and 10% fetal bovine serum (Invitrogen). Cells were transfected using Invitrogen™ Lipofectamine™ 2000 transfection reagent according to the manufacturer's instructions. On the day of transfection, 5 μg plasmid DNA was mixed with 15 μl of Invitrogen™ Lipofectamine™ reagent 2000 in 0.5 ml of serum-free DMEM. The mixture was incubated for 20 minutes at room temperature before it was added to the cells. Cells were incubated at 37° C. in a CO₂ incubator for 48 hours. To study the protein secretion of the HER ECD derivatives, the conditioned medium was collected after 48 hours. Conditioned medium was analyzed by separation on SDS-polyacrylamide gels followed by immunoblotting using an anti-His antibody (manufactured, for example, by Qiagen). Antibodies were diluted 1:5000.

[0988] Culture medium from cultured human cells was assessed for secretion of each of the HER ECD derivatives. Comparisons of the secretion of the HER ECD derivatives are set forth in Table 16 below:

TABLE 16
Protein Secretion of HER ECD derivatives

| HER Family | Name | Synonym | Secretion |
|---|---|---|---|
| EGFR (HER1) | HF110 | HER1-501 | +++ |
| | HF100 | HER1-621 | ++++ |
| HER2 | HF220 | HER2-530 | ++++ |
| | HF210 | HER2-595 | ++++ |
| | HF200 | HER2-650 | +++ |
| HER3 | HF310 | HER3-500 | ++ |
| | | P85HER3 | + |
| | | HER3-519 | + |
| | HF300 | HER3-621 | ++ |
| HER4 | HF410 | HER4-485 | − |
| | | HER4-522 | ++ |
| | HF400 | HER4-650 | +++ |
| ERRP | HF120 | ERRP | − |

### Example 2

### HER-Fc Fusion Preparation and Protein Expression

### A. Cloning of the Fc Fragment of Human IgG1

[0989] The Fc fragment of human IgG1 (set forth in SEQ ID NO:167, and corresponding to amino acids Prol00 to Lys330 of the sequence of amino acids set forth in SEQ ID NO:163) was PCR amplified from a single strand cDNA pool using the following forward and reverse primer pair:

(SEQ ID NO: 49)
5′CCC AAA TCT TGT GAC AAA ACT ACT C 3′
(SEQ ID NO: 50)
5′TTT ACC CGG GGA CAG GGA G 3′

[0990] The PCR fragment was gel purified and subcloned into the pDrive cloning vector (Qiagen® PCR cloning kit, Qiagen, Valencia, Calif.; SEQ ID NO:160) to generate pDrive/IgG1Fc.

### B. Fusion of Fc to HER Extracellular Domains

[0991] HER1-621/Fc (SEQ ID NO:40) was cloned as follows: the pcDNA/HER1-621-myc-His vector was restriction digested with XhoI and AgeI. The cut plasmid was purified using a Qiagen® gel purification kit (Qiagen). The human IgG1 Fc fragment was PCR amplified from the pDrive/IgG1Fc vector using the following primers:

(containing an XhoI site, SEQ ID NO: 51)
5′ATTA CTCGAG GGA CGA ATG GAC CCC AAA TCT TGT
GAC AAA ACT C 3′
(containing an AgeI site, SEQ ID NO: 52)
5′ACTT ACCGGT TTT ACC CGG GGA CAG GGA G 3′

[0992] The PCR amplified Fc fragment was digested with XhoI and AgeL and ligated into the digested pcDNA/IER1-621-myc-His vector.

[0993] HER3-621/Fc (SEQ ID NO:46) was cloned as follows: the pcDNA/IER3-621-myc-His vector was restriction digested with XbaI and Age1. The cut plasmid was purified using Qiagen® gel purification kit. The human IgG1 Fc fragment was PCR amplified from pDrive/IgG1 Fc by primers:

(containing an XbaI site, SEQ ID NO: 53)
5′ATTA TCTAGA GGA CGA ATG GAC CCC AAA TCT TGT
GAC AAA ACT C
(containing an AgeI site, SEQ ID NO: 52)
5′ACTT ACCGGT TTT ACC CGG GGA CAG GGA G 3′

[0994] The PCR amplified Fc fragment was digested with XbaI and AgeI and ligated into the digested pcDNA/IER3-621-myc-His vector.

[0995] The other fusion constructs were similarly prepared. All of the resulting fusion constructs were verified by DNA sequencing. Exemplary Fc fusion protein constructs are set forth below in the following Table, Table 17:

TABLE 17

SEQ ID NO

| HER Family | Name | Synonym | Nt. | aa |
|---|---|---|---|---|
| EGFR | HF110-Fc- | HER1-501/Fc | 37 | 38 |
| (HER1) | myc | | | |
| | HF100-Fc | HER1-621/Fc | 39 | 40 |
| HER2 | HF200-Fc | HER2-650/Fc | 41 | 42 |
| HER3 | HF310-Fc | HER3-500/Fc | 43 | 44 |
| | HF300-Fc | HER3-621/Fc | 45 | 46 |
| HER4 | HF400-Fc | HER4-650/Fc | 47 | 48 |

### C. Protein Expression and Secretion

[0996] To generate HER-Fc chimeric proteins, a HER ECD Fc fusion construct (HER1-621/Fc; HER3-621/Fc; HER2-650/Fc; HER4-650/Fc) was individually transfected into 293T cells using Invitrogen™ Lipofectamine™ 2000 reagent, as described in Example 1. Conditioned medium was collected 48 hours after transfection. Equal amounts of conditioned medium (20 μl) were separated on a denaturing protein gel. Western blots were probed with anti-His (Qiagen) or anti-Fc (Sigma) antibody to check the protein expression and secretion. Comparisons of the secretion of the HER ECD derivatives are depicted in the Table below:

TABLE 18
Protein Secretion of HER Fc fusion proteins

| Name | Molecule | Secretion |
|---|---|---|
| HER1-Fc | HER1-621/Fc | +++ |
| HER2-Fc | HER2-650/Fc | ++ |
| HER3-Fc | HER3-621/Fc | ++ |
| HER4-Fc | HER4-650/Fc | ++ |

[0997] To generate multimers of HER1 and HER3, the HER Fc fusion constructs (HER1-621/Fc and HER3-621/Fc) each were co-transfected into 293T cells using Invitrogen™ Lipofectamine™ 2000 reagent in accord with the manufacturer's instructions. Conditioned medium from each transfection was collected 48 hours after transfection. Equal amounts of conditioned medium (20 μl) were separated on a denaturing protein gel. Western blots were probed with anti-His (Qiagen) or anti-Fc (Sigma) antibody to check the protein expression and secretion.

[0998] To express the heterodimer of RB200h (also called HFD 100/300H (full length HER 1 ECD linked to full length HER 3 ECD via Fc domain)), the constructs of Her1 and Her3 were cotransfected in a ratio of 1:3 (Her1:Her3). The media is replaced with DMEM+1% FBS (low IgG) after 5 hours of TT. First conditioned media were collected 4 days post TT, followed by feeding and a second collection.

[0999] Suspension cell protein expression was also done using CHO cells and HEK 293T cells that were previously adapted to serum free media (FreeStyle 293). The HEK 293T cells were seeded in Cytvia® WAVE™ bioreactors at 1×10⁶ cells/ml with Invitrogen™ Freestyle™ 293 media. The next day HER ECD constructs (HER1-621/Fc and HER3-621/Fc) were TT into 293T cells using 25 kD linear PEI (Polysciences):DNA at a ratio of 1:2. To express the heterodimer of RB200h, the constructs of Her1 and Her3 were cotransfected in a ratio of 1:3 (Her1:Her3). After 5 hours of TT, the media volume is doubled. The viable cells and the protein production were monitored daily. Conditioned media were collected 6 days post TT.

### Example 3

### Purification of HER (HF) Derivatives and HER-Fc (HFD) Molecules

[1000] All HF molecules with a “T” suffix contain a C-terminal 6-histidine tail for metal affinity purification. All of these molecules were purified using Ni-affinity metal chromatography followed by preparative size-exclusion chromatography (SEC). First, conditioned medium (CM) containing a secreted HF molecule was clarified by centrifugation (30 min, 10K rpm) and then filtered (0.3 micron). Clarified CM was then concentrated 4× using a Pall™ tangential flow concentrator (Pall Corporation, Ann Arbor, Mich.) to bring the final CM volume to approximately 400 ml.

[1001] The CM was brought to 50 mM NaPO₄ (pH 8.0) and 350 mM NaCl by the addition of 10× Ni-NTA loading buffer. The solution was then loaded at a flow rate of 0.6 ml/min onto a 1.5 ml nickel affinity metal chromatography column (Ni-NTA Agarose, Qiagen, Germany) pre-equilibrated with Buffer A (Buffer A: 50 mM NaPO4 (pH 8), 350 mM NaCl). After loading the column was washed with Buffer A until the absorbance at 280 nm indicated no unbound protein remained. The HF molecule was then eluted by an isocratic gradient of Buffer A+150 mM imidazole. Peak fractions containing the HF molecule were pooled and concentrated to 1 ml then loaded onto a preparative SEC column (Superose® 12 10/300 GL, Amersham Biosciences, Sweden). The peak fractions containing HF monomer were identified by immunoblotting with a horseradish peroxidase conjugated mouse anti-His6-Tag antibody (HyTest Ltd., Turku, Finland). HF molecule amino acid sequencing was carried out to confirm each molecule.

[1002] The HFD100/IFD300T heterodimer is an Fc fusion of HFD100 and HFD300T. Transient transfection to produce this molecule also produces the homodimers designated HFD100 and HFD300T. The HFD300T homodimer and the HFD100/HFD300T heterodimer were purified by Ni-NTA affinity chromatography (Ni-NTA Agarose, Qiagen, Germany) as HF300T contains a C-terminal 6-Histidine tag. Conditioned medium (CM) was clarified and concentrated as described above. The resulting CM was loaded onto a 1.5 ml ProteinA column (nProteinA Sepharose® 4 Fast Flow, Amersham Biosciences, Sweden) and eluted with Pierce™ ImmunoPure IgG Elution Buffer (Pierce, Rockford, Ill.). Upon elution the fractions were neutralized by the addition of 50 μl 1M tris-HCl buffer (pH 8.0). Fractions containing protein were pooled and the solution brought to 50 mM NaPO₄ (pH 8.0) and 350 mM NaCl. This pool was loaded onto a 1.5 ml nickel affinity metal chromatography column (Ni-NTA Agarose, Qiagen, Germany) pre-equilibrated with Buffer A. The flow-through containing HFD100 homodimer was collected. After washing with Buffer A, HFD300T homodimer and HFD100/IFD300T heterodimer proteins were eluted with an isocratic gradient of Buffer A+150 mM imidazole.

[1003] A 10 ml EGF affinity column was produced by covalently linking 10 mg of EGF (R&D Systems, Minneapolis, Minn.) to a Sepharose® solid support using 3 ml of CNBr-activated Sepharose® 4 Fast Flow beads (Amersham Biosciences, Finland). Peak fractions from the Ni-NTA eluate were pooled and immediately chromatographed on the EGF affinity column. A peak corresponding to HFD300T was collected in the flow-through. The HFD100/HFD300T heterodimer was eluted with IgG elution buffer, and the fractions containing protein were pooled and chromatographed using a preparative SEC column (Superose® 12 10/300 GL, Amersham Biosciences, Sweden). This step removes any EGF which eluted during the EGF affinity column step. Fractions containing purified HFD100/300T were neutralized with 50 μl 1M tris (pH 8.0), buffer exchanged into PBS and concentrated with a 30 kD-cutoff Amicon® spin filtration column (Millipore, Billerica, Mass.).

[1004] RB600 was purified by taking conditioned media from transfected cells in Example 2 and clarifying by centrifugation at 12,000×g for 15 min at 4° C., followed by filtration through a 3 μm Versapor® 3000T filter (Pall Corporation, East Hills, N.Y.). The clarified conditioned media was concentrated 10-fold by ultrafiltration through a 30 kDa cutoff. Ultracel® Screen Channel tangential flow filtration device (Pall Corporation, East Hills, N.Y.) and applied to a MabSelect SuRe™ affinity column (GE Healthcare Biosciences AB, Sweden). The column was washed extensively with PBS containing 0.1% (v/v) TX-114 and eluted with an IgG elution buffer (Pierce Biotechnology Inc., Rockville, Ill.). The eluted fractions were immediately neutralized with 1M Tris-HCL to pH 8.0.

[1005] At this stage, Fc-containing proteins eluting from the MabSelect SuRe™ affinity column consisted of RB200h heterodimer as well as HFD100 and HFD300h homodimers. This mixture of RB200h heterodimer as well as HFD100 and HFD300h homodimers is called RB600. This homodimer/heterodimer mixture was used directly as a mixture after dialyzing against PBS (RB600) or was used as the starting material for the further purification of RB200h (full length HER 1 ECD linked to full length HER 3 ECD via Fc domain; also called H1FD1000/HIFD300H).

### Purity Analysis

[1006] Analytical Reversed-phase HPLC was used to determine protein purity. Reversed-phase HPLC of proteins was performed using an analytical C4 column (150×46 mm; 5 mm; 100 Å) from Kromasil attached to an AKTA: Purifier System (GE-Healthcare). Buffer A consisted to 0.1% TFA (v/v) in water and Buffer B contained 25% 2-propanol; 75% Acetonitrile; 0.1% TFA (v/v). Typically, 50-100 mg of protein were loaded and a linear gradient of 5-95% buffer B was used to elute samples (flow rate=0.5 mL/min; gradient=6%/min.).

[1007] Under conditions in this system, the homodimer containing the 2 erbB3 chains elutes first followed by the heterodimer (RB200h) then the erbBl homodimer. Peak assignments were performed using two approaches. First, standards purified from singly transfected cells--coding for only one polypeptide chain--were used to identify the homodimer peaks. Second, fractions from each peak were submitted for N-terminal sequencing (Stanford: PAN facility) to verify initial assignments (data not shown).

[1008] The purification scheme employed combination of Protein-A, Ni-Sepharose® and EGFR-Affybody® columns. The purified RB200h was judged as >90% pure by SDS PAGE and reversed phased HPLC. As shown by the analytical reversed-phase HPLC chromatogram, the RB200h (full length HER 1 ECD linked to full length HER 3 ECD via Fc domain) is pure, with no more than 10% combined contamination with HFD 100 and HFD 300.

[1009] Examples below provide methods for purification of heterodimers.

### Example 4

### Binding of HER ECD or HER-Fc to Ligand

### A. Binding of HER ECD Derivatives to Epidermal Growth Factor (EGF)

[1010] The extracellular domains of HER1 (HER1), HER2, HER3, and HER4 were fused to human Fc (see Examples 1 and 2) to produce chimeric polypeptides. HER ECD (HER-T) or HER-Fc was obtained from conditioned medium from cells transfected with the relevant vector (see Example 1 and 2 above). Supernatants were collected from 293T cells transiently transfected with the relevant cDNA constructs. Binding of radiolabeled EGF (Amersham) to supernatants containing HER1-621/Fc, HER2-650/Fc, HER3-621/Fc, HER4-650/Fc, HER1-501/Fc, HER1-621(T), HER1-501(T) was determined as follows: Binding was performed by mixing 20 μl of supernatant and 5 nM of ¹²⁵I-EGF with or without 1000× excess of cold EGF in Hepes buffer pH 7.5 at room temperature for 2 hours. BS³, a chemical crosslinker (Pierce) was added at the end of the binding assay to cross-link the bound molecules. Samples were separated on an SDS-PAGE gel and exposed to a film for detection. Estimated ¹²⁵I binding to HER molecules was normalize to the equal molar concentration. The results show that ¹²⁵I-EGF bound only to HER1 derivatives, and no binding of ¹²⁵I-EGF was detected to HER2-650/Fc (HFD200), HER3-650/Fc (HFD300), or to HER4-650/Fc (HDD400). Binding of ¹²⁵I-EGF to HER1-621/Fc (HFD100) was completely competed with excess cold EGF.

[1011] Western blotting with an anti-HER1 antibody (R&D Systems), followed by densitometry was used to estimate relative HER1-derivative levels and then to normalize ligand binding to each protein. The results show that HER1-621/Fc (HFD100) has greater binding affinity for ¹²⁵I-EGF than the HER1-501/Fc (HFD110) and HER1-501 (HF 110), and much greater binding affinity than the non-Fc full length HER1 ECD (HER1-621; HF100). It is shown below that the Fc fusions form dimers upon expression. Thus, these ligand binding results show that the fusion/dimerization mediated by the Fc portion restores the high affinity binding of the full-length ECD of HER1 that exceeds that of the HER1-501 monomer molecule.

[1012] Additional experiments demonstrate that HFD100 (HER-621/Fc) and HFD110 (HER1-501/Fc) exhibit substantially increased binding to ¹²⁵I-EGF ligand compared to HF100, whereas HF 110 exhibited no detectable binding to ¹²⁵I-EGF. Furthermore, data demonstrate that the HER1/HER3 (HFD100/IFD300) heterodimer bound to ¹²⁵I-EGF substantially more than HF100 and HF 110, but less than the HFD100 or HFD 110 homodimers, as expected.

### B. Binding of HER ECD Derivatives to Heregulin (HRG)

[1013] The binding of HER ECD derivatives to heregulin was performed using a similar assay as described for binding to EGF described in part A above. Briefly, supernatants were collected from 293T cells transiently transfected with cDNA constructs encoding HF300 (HER3-621), HF310 (HER3-501), HFD300 (HER3-621/Fc), HFD310 (HER3-501/Fc); and a purified HFD110/HFD310 heteromultimer (a construct of HF110 and HF310 linked via the Fc fragment of IgG1). Binding was performed by mixing increasing amounts of supernatants (from 2.5 μl-20 μl of supernatant) with 5 nM of ¹²⁵I-HRG in a total volume of 20 μl of Hepes buffer (pH 7.5) at room temperature for 2 hours. 1 mM of the BS₃ crosslinker was added at the end of the binding assay to cross-link the bound molecules. Binding reactions were separated on an SDS-PAGE gel. The protein gel was dried and exposed to a film for 2 and 6 hours.

[1014] The results show that all derivatives tested bound HRG to some extent, although at varying levels. For all derivatives tested, binding was dose-dependent with the greatest binding observed at 20 μl of supernatant. A parallel Western blot with an anti-HER3 antibody (R&D Systems), followed by densitometry was used to estimate relative HER3-derivative levels and then to normalize ligand binding to each protein based on equal number of binding sites, which are the equivalent to anti-HER3 binding sites. After such a normalization, the results showed that HRG displayed the lowest binding to the HF300 molecule, with only about 10% of the binding as compared to the other derivatives tested. Each of HF310, HFD300, HFD310, and HFD 110/HFD310 showed equivalent binding to HRG following normalization.

### C. Comparative Analysis of Binding of HER Derivatives to Epidermal Growth Factor (EGF) and Heregulin (HRGs)

[1015] The specificity of the various HER derivatives was compared by testing them for their binding to ¹²⁵I-EGF, a natural ligand for HER1, and ¹²⁵I-IRG, a natural ligand for HER3 and HER4. Binding of radiolabeled EGF to HER1-621/Fc, HER2-650/Fc, HER3-621/Fc, HER4-650/Fc was determined as described above. Binding of ¹²⁵I radiolabeled HRG to HER1-621/Fc, HER2-650/Fc, HER3-621/Fc, HER4-650/Fc was determined using the same conditions as described for binding of ¹²⁵I-EGF. Western blots were probed with anti-His antibody to compare protein levels. The results show that radiolabeled EGF binds only to HER1-621/Fc and not to the other molecules tested. Radiolabeled HRG binds only to HER3-621/Fc and HER4-650/Fc molecules.

[1016] Conditioned medium from cells co-transfected with HER1-621/Fc and HER3-621/Fc (see Example 2) or HER1-501/Fc and HER3-501/Fc was tested for binding to ¹²⁵I-EGF and ¹²⁵I-HRG. The data show that cells co-transfected with HER1-621/Fc:HER3-621/Fc produce protein that binds to radiolabeled EGF and to HRG.

[1017] Western blots were probed with anti-HER1 and anti-HER3 (R&D Systems) to compare protein levels. The binding of radiolabeled ligand was proportional to the amount of protein expressed by the co-transfected cells, which includes HER1/HER1 homodimers, HER1/HER3 heterodimers, and HER3/HER3 homodimers. HER1-621/Fc homodimer (termed HFD100) bound ¹²⁵I-EGF, whereas HER3-621/Fc homodimer (HFD300) and HER4-625/Fc (HFD400) bound ¹²⁵I-HRG1(31. The HER2-628/Fc (HFD200) did not show any detectable ¹²⁵I-EGF or ¹²⁵I-HRG1β1 binding. The data show that HFD100, HFD200, HFD300, and HFD 400 retain their specificity for EGF and HRG1b1. In parallel studies, crosslinking of these ligands could be completed by their respective unlabeled ligands, indicating that the binding is specific.

[1018] A chimeric construct of HER1-621/Fc and HER3-621/Fc (termed RB200h) is a pan-HER ligand binding hermodulin. This molecule (RB200h) was tested for its ability to bind HER1 or HER3 ligands by crosslinking studies using ¹²⁵I-EGF or ¹²⁵I-HRG101. The data show that RB200h binds both EGF and HRG101. These findings revealed that HER1 and HER3 in the chimeric hermodulin (RB200h) retain their ability to bind their respective ligand.

### Example 5

### Formation of Dimeric and Oligomeric Structures of HER Extracellular Domains and HER/Fc Molecules

[1019] In an activated form, HER molecules present their dimerization arm in an orientation to facilitate formation of dimerization with other cell surface receptors. Linkage of HER derivatives to the Fc domain predicts a “back-to-back” conformation that would mimic an activated receptor. To demonstrate that HER derivatives and/or HER/Fc chimeric polypeptides form multimers, molecular size exclusion analysis was performed on the HER family extracellular domain polypeptides. This methodology permits simplified analysis of the ability of receptor ectodomains to associate as either homodimers or heterodimers. To perform molecular size exclusion analysis, eluted molecules were compared to reference standards. Table 19 below shows the molecular mass standards used and their elution volume. Smaller volumes elute in the retained volume of the column, while larger molecules elute in smaller volumes according to their increasing molecular mass. See Table 19, below:

TABLE 19

| Standard | Mol. Wt. | Elution Vol (ml) |
|---|---|---|
| Vitamin B- | 1350 | 11.80 |
| Myoglobin | 17,000 | 10.37 |
| Ovalbumin | 44,000 | 8.96 |
| Gamma globulin | 158,000 | 8.04 |
| Thyroglobulin | 670,000 | 6.94 |
| Aggregate | 2,631,657 | 6.05 |

[1020] Molecular size exclusion analysis was performed using an A TSKgel® 3000 size exclusion column (Tosoh Bioscience, Montgomeryville, Pa.) equilibrated with PBS at a flow rate of 0.7 ml/min. Gel filtration standards (BioRad, Hercules, Calif.) were used to calibrate the column. Their elution volumes and molecular weights were plotted. Elution volumes were determined for each unknown by injection of 30 μg of each molecule in PBS and their apparent molecular weights calculated. Flow was maintained over the column between injections. Molecular weights were determined using a Standard curve for molecular weight standards. Table 20 below summarizes the results:

TABLE 20
Size exclusion analysis of HER ECD derivatives

| | | | Calculated | Apparent | |
|---|---|---|---|---|---|
| | | | M. Wt. | M. Wt. | M. Wt. |
| HER family | Name | Synonym | (M. Wt.) | (M. Wt. (ap)) | (ap):M. Wt. |
| HER1 | HF110T | HER1-501 | 60,000 | 112,170 | 1.87 |
| | HFD100T | HER1-621/Fc | 180,000 | 970,003 | 5.39 |
| HER2 | HF210T | HER2-595 | 67,000 | 162,069 | 2.42 |
| | HF220T | HER2-530 | 60,000 | 81,676 | 1.36 |
| HER3 | HFD300T | HER3-621/Fc | 180,000 | 843,627 | 4.69 |
| | HF300T | HER3-621 | 72,000 | 186,347 | 2.66 |
| | HF310T | HER3-500 | 63,000 | 110,755 | 1.76 |
| HER4 | HF410T | HER4-485 | 60,000 | 122,590 | 1.98 |

[1021] The data show that several of the extracellular domains of the HER family form multimeric structures. The compounds can trap ligand, and form “mock” dimers to prevent dimerization of transmembrane receptor and to thereby bind to and interfere with the activity of the transmembrane protein.

[1022] HER1-501 exhibited an apparent molecular mass 112,170 daltons, which is greater than its predicted mass of 60,000 daltons; HER2-595 exhibited an apparent molecular mass of 162,000 daltons versus a predicted mass of 67,000 daltons. HER2-530 (F11220T), which is missing a segment of the HER2 extracellular domain (CSQFLRGQECVEECRVLQGLPREYVNARHCLPCHPECQPQNGSVTCFGPE ADQCVACAHYKDPPF, corresponding to amino acids 508-573 in SEQ ID NO:16) spanning modules 2-5 in domain IV compared to HER2-595 (H1F210T), does not form dimeric structures. This latter result indicates that this missing segment (or a portion of segment) is important for dimerization. The differences in the sequences of the two polypeptides are underlined below and made BOLD. The shaded sequences are the tags employed and are the same for both molecules. Since the tags are common to both molecules, they do not play a role in the observed effects on dimerization.

```
210 with affinity tag
(SEQ ID NO: 274)
    TQVCTGTD MKLRLPASPE THLDMLRHLY QGCQVVQGNL
ELTYLPTNAS LSFLQDIQEV QGYVLIAHNQ VRQVPLQRLR
IVRGTQLFED NYALAVLDNG DPLNNTTPVT GASPGGLREL
QLRSLTEILK GGVLIQRNPQ LCYQDTILWK DIFHKNNQLA
LTLIDTNRSR ACHPCSPMCK GSRCWGESSE DCQSLTRTVC
AGGCARCKGP LPTDCCHEQC AAGCTGPKHS DCLACLHENH
SGICELHCPA LVTYNTDTFE SMPNPEGRYT FGASCVTACP
YNYLSTDVGS CTLVCPLHNQ EVTAEDGTQR CEKCSKPCAR
VCYGLGMEHL REVRAVTSAN IQEFAGCKKI FGSLAFLPES
FDGDPASNTA PLQPEQLQVF ETLEEITGYL YISAWPDSLP
DLSVFQNLQV IRGRILHNGA YSLTLQGLGI SWLGLRSLRE
LGSGLALIHH NTHLCFVHTV PWDQLERNPH QALLHTANRP
EDECVGEGLA CHQLCARGHC WGPGPTQCVN CSQFLRGQEC
VEECRVLQGL PREYVNARHC LPCHPECQPQ NGSVTCFGPE
ADQCVACAHY KDPPFLESRG PFEQKLISEE DLNMHTGHHH
HHH
220 with affinity tag
(SEQ ID NO: 275)
    TQVCTGTD MKLRLPASPE THLDMLRHLY QGCQVVQGNL
ELTYLPTNAS LSFLQDIQEV QGYVLIAHNQ VRQVPLQRLR
IVRGTQLFED NYALAVLDNG DPLNNTTPVT GASPGGLREL
QLRSLTEILK GGVLIQRNPQ LCYQDTILWK DIFHKNNQLA
LTLIDTNRSR ACHPCSPMCK GSRCWGESSE DCQSLTRTVC
AGGCARCKGP LPTDCCHEQC AAGCTGPKHS DCLACLHENH
SGICELHCPA LVTYNTDTFE SMPNPEGRYT FGASCVTACP
YNYLSTDVGS CTLVCPLHNQ EVTAEDGTQR CEKCSKPCAR
VCYGLGMEHL REVRAVISAN IQEFAGCKKI FGSLAFLPES
FDGDPASNTA PLQPEQLQVF ETLEEITGYL YISAWPDSLP
DLSVFQNLQV IRGRILHNGA YSLTLQGLGI SWLGLRSLRE
LGSGLALIHH NTHLCFVHTV PWDQLERNPH QALLHTANRP
EDECVGEGLA CHQLCARGHC WGPGPTQCVN LESRGPFEQK
LISEEDLNMH TGHHHHHH
```

[1023] The data also show that HER-Fc proteins also form high order oligomers. HER1-621/Fc and HER3-621/Fc each have predicted molecular weights of 180,000 daltons, and observed molecular weights by size exclusion chromatography of greater than 970,000 and 843,000 daltons, respectively. Because these assays were performed in the absence of ligand, this result further demonstrates that ligand is not needed in order to create a dimerized (or higher order) structure.

### Example 6

### HER Receptor Proliferation and Phosphorylation: Inhibition by HER Derivatives

### A. HER Expression Profiles in Cell Lines

[1024] HER expression level was analyzed by Fluorescence Activated Cell Sorting (FACS) to identify the receptors and relative amounts thereof on the surface of various cells lines. Selected cells were contacted with receptor-specific antibodies and the intensity of fluorescence upon binding cells with receptor-specific antibodies was assessed.

[1025] Cells were lifted from tissue culture plate with 5 nM EDTA and resuspended in PBS containing 1% of BSA (PBS.BSA). Cells in suspension were incubated with monoclonal antibodies against each of HER1, 2, 3 and 4 in respective tubes, for 1 hr at 4° C. After the first antibody incubation, cells were washed with cold PBS.BSA once. The second antibodies, against mouse or human IgG (depending upon the origin of the first antibodies) tagged with a fluorescent dye PE (Jackson), then were added. The cells were incubated for 30 min at 4° C. and washed twice with PBS.BSA wash. Cells were fixed by adding BD Cytofix™ fixation buffer (BD-554655) and kept in dark at 4° C. FACSs was performed using a Cell Sorter apparatus (BD FACSCalibur™ Flow Cytometer). 10,000 cells of each cell line were analyzed. The Mean Fluorescence Intensity (MFI) of each HER receptor in each cell lines were measure by MFI with BD CellQuest™ Pro Software. Scoring: ++++>1000 MFI, +++100-1000 MFI, ++50-100 MFI, +<50 MFI but have signal above background.

[1026] Table 21 below presents the resulting expression profiles of the HER family of receptors in various cells lines.

TABLE 21
HER Expression Profiles in Cell Lines

| | | HER Expression | | | |
|---|---|---|---|---|---|
| | Cell lines | HER1 | HER2 | HER3 | HER4 |
| Tumor cell | A431 | +++ | + | | |
| lines | SK-BR3 | ++ | +++ | ++ | |
| | SK-OV3 | ++ | +++ | | |
| | MCF7 | | + | ++ | + |
| | MCF7/HER2 | | ++++ | ++ | |
| | ME180 | +++ | ++ | | |
| Non-tumor | PNT 1A | ++ | + | | |
| | HEK293 | + | ++ | | |

### B. Cell Proliferation Assay

[1027] Cell lines MCF7, ZR75-1, ME180 were purchased from ATCC and kept in 10% of FBS DMEM. Cells were seeded at 2000 per well in 96-well plate in 1% FBS supplemented DMEM. After 2-3 hr of seeding, increasing concentrations of candidate HER ECD derivatives were added to the culture in the present of ligands (EGF or HRGβ). Cells were incubated at 37° C. for about 72 hr. Cells relative density were measured by alamarBlue™ method. alamarBlue™ (Sigma) was prepared in PBS at concentration of 4 uM, added to the microplate at 1/10 volume of culture medium (final concentration 0.4 uM) and plates returned to the incubator. Fluorescence was read at Ex.=530 nm/Em.=590 nm after 2-4 hours at 37° C.

### Results

[1028] Cell Proliferation Data: The HFD100/300 preparation was a pool of HFD100/100, HFD300/300, and HFD100/300 molecules in unknown proportions. Nevertheless, the data evidence the ability of the hybrid material to perform inhibition. HFD 100/300 inhibited ME180 proliferation stimulated by HRGβ (5 nm). The data indicated greater than 80% inhibition at about 3 nM HFD100/300 as well as against EGF-stimulated HER1. HF310T inhibited MCF7 proliferation stimulated by HRGβ (about 95% at 1 μm).

### C. ELISA-Based HER Receptor Phosphorylation Assay

[1029] Phosphorylation of HER receptors was assessed in an ELISA-based HER Receptor phosphorylation assay. Various cells (A431, MCF7, SK-BR3, SK-OV3, MCF7/HER2) were serum-starved in serum free medium for about 24 hr. Cells were then treated with increasing concentrations of candidate HER ECD derivatives (see below) for 30 min at 37° C., ligands (EGF, 3 nM and/or HRGβ, 5 nM were then added for 10 min incubation. After treatment, cells were washed with PBS once and lysed with 100 μl of 1× Cell Lysis Buffer (Cell Signaling) with addition of protease and phosphatase inhibitors (Protease Inhibitor Cocktail Set and Phosphatase Inhibitor Set, Calbiochem).

[1030] Cells were lysed on ice for 15 min and cell lysate were applied to a 96-well plate pre-coated with the respective receptor-specific capture antibodies (antibodies were purchased from R & D System) by manufacture recommended concentrations (0.4 to 4 μg/ml) and condition (in PBS, room temperature, overnight). Cell lysates were incubated with the capture Ab plate for 3 hrs at room temperature. Plates were washed 3× with PBST buffer. Anti-phosphotyrosine antibody clone 4G10 HRP-conjugated (Upstate) were diluted at 1:1000 in 1% of BSA.PBS and added to the plates, 100 μl/well for 1 hr to detect specifically HER receptors phosphorylated on tyrosine. After 3×PBST wash, the plates were developed by adding 100 μl of substrate solution (TMB, Sigma) and stopped by 50 μl of SDS stop solution. The optical density was determined by microplate reader at 650 nm (Molecular Devices, VERSAmax).

i. HER1-501

[1031] The ability of HER1-501 to inhibit phosphorylation of HER1 and HER2 was tested in A431 cells and MCF7 cells. Increasing concentrations of HER1-501, up to a maximum concentration of 600 nM, was added to cells in the presence of EGF. As expected, no phosphorylation of HER1 in MCF7 cells was observed. In contrast, HER1 dose-dependently inhibited the phosphorylation of HER1 in A431 cells, with an IC₅₀ of 98 nM. The maximal inhibition of HER1 phosphorylation achieved at 600 nM HER1-501 was about 60% compared to the absence of the protein. HER1-501 also dose-dependently inhibited the phosphorylation of HER2 in MCF7 and A431 cells with an IC₅₀ of 18 nM and 42 nM, respectively. The maximal inhibition of HER2 phosphorylation, in both cell lines tested, achieved at 600 nM HER1-501 was about 50% compared to the absence of the protein.

ii. HER2-595 and HER2-530

[1032] The ability of HER2-595 and HER2-530 to inhibit phosphorylation of HER2 and HER3 was tested in MCF7/HER2 cells. Increasing concentrations of HER2-595 or HER2-530 (0, 7.4 nM, 22.2 nM, 66.7 nM, 200 nM, and 600 nM) were added to cells in the presence of HRG. The data show that HER2-595 and HER2-530 dose-dependently inhibited the phosphorylation of HER2 and HER3; HER2-595 was more potent. The maximal inhibition of HER2 and HER3 phosphorylation achieved by 600 nM HER2-595 in MCF7/HER2 cells was about 55% compared to the absence of the protein, whereas the maximal inhibition achieved by 600 nM HER2-530 was about 35% compared to the absence of the protein.

iii. HER3-621 and HER3-500

[1033] The ability of HER3-621 and HER3-500 to inhibit phosphorylation of HER3 was tested in MCF7 cells. Increasing concentrations of HER3-621 and HER3-500, up to a maximum concentration of 600 nM, was added to cells in the presence of HRG. The data show that HER3-621 and HER3-500 dose-dependently inhibited the phosphorylation of HER3, although HER3-500 was more potent. The IC50 of HER3-500 was 39 nM, and the IC50 of HER3-621 was 48 nM. The maximal inhibition of HER3 phosphorylation in MCF7 cells achieved by 600 nM HER3-500 was about 78% compared to the absence of the protein, and the maximal inhibition achieved by 600 nM HER3-621 was about 38% compared to the absence of the protein.

[1034] The ability of HER3-621 and HER3-500 to inhibit phosphorylation of HER1 and HER3 was tested in SK-BR3 cells. Increasing concentrations of HER3-621 and HER3-500, up to a maximum concentration of 600 nM, was added to the cells in the presence of HRG. Phosphorylation of HER1 was not observed in SK-BR3 cells stimulated by HER3-500. Similar to MCF7 cells, HER3-621 and HER3-500 dose-dependently inhibited the phosphorylation of HER3 in SK-BR3 cells, with HER3-500 being more potent. The maximal inhibition of HER3 phosphorylation in SK-BR3 cells achieved by 600 nM HER3-500 was about 75% compared to the absence of the protein, and the maximal inhibition achieved by 600 nM HER3-621 was about 55% compared to the absence of the protein.

iv. HER1-621/Fc

[1035] The ability of HER1-621/Fc to inhibit phosphorylation of HER1 was tested in A431 cells. Increasing concentrations of HER1-621/Fc (from 0.8 nM to 600 nM) was added to the cells in the presence of EGF. HER1-621/Fc dose-dependently inhibited phosphorylation of HER1 in A431 cells, with an IC₅₀ of 8.8 nM. At 600 nM, HER1-621/Fc showed almost complete inhibition of HER1 phosphorylation, inhibiting phosphorylation by about 99% as compared to the absence of the protein.

v. HER3-621/Fc

[1036] The ability of HER3-621/Fc to inhibit phosphorylation of HER3 was tested in MCF7 cells. Increasing concentrations of HER3-621/Fc (from 0.8 nM to 600 nM) was added to the cells in the presence of HRG. HER3-621/Fc dose-dependently inhibited phosphorylation of HER3 in MCF7 cells. The maximal inhibition of HER3 phosphorylation in MCF7 cells achieved by 600 nM HER3-621/Fc was about 70% compared to the absence of the protein.

vi. HER1-621/Fc:HER3-621/Fc Chimera

[1037] The ability of HER1-621/Fc:HER3-621/Fc chimera to inhibit phosphorylation of HER1 was tested in A431 cells. Conditioned medium supernatant from cells co-transfected with HER1-621/Fc and Her3-621/Fc was serially diluted two-fold and added to cells in the presence of EGF. The recombinant protein in neat supernatant is about 2 μg/ml (about 10 nM). Supernatant from cells not transfected with the HER ECD/Fc proteins was used as a control. The results showed that the control supernatant showed little to no inhibition of HER1 phosphorylation, with only a small inhibition (less than 10%) observed by neat supernatant. In contrast, the supernatant containing the HER1-621/Fc:HER3-621/Fc chimera dose-dependently inhibited HER1 phosphorylation in A431 cells stimulated by EGF. The maximal inhibition of HER1 phosphorylation in A431 cells achieved by the neat supernatant containing the HER1-621/Fc:HER3-621/Fc chimeras was about 55% compared to the absence of protein.

### D. Inhibition of HER Receptor Proliferation and Phosphorylation by Purified HFD100/300 ECD Multimer

### 1. Phosphorylation

[1038] Phosphorylation of HER receptors was assessed by purified HFD100/300H as described in section C above. The ability of purified HFD100/300H (an ECD molecule containing HER1-621/Fc and HER3-621/Fc with a His epitope tag) to inhibit phosphorylation of HER1 and HER3 was tested in SK-BR3 cells. To assess effects of HER1 phosphorylation induced by EGF, increasing concentrations of HFD100/300H from 0.3 nM to 600 nM was added to cells in the presence of EGF. The results showed that the HFD100/300H molecule dose-dependently inhibited HER1 phosphorylation of SK-BR3 cells stimulated by EGF. The maximal inhibition of HER1 phosphorylation in SK-BR3 cells achieved at 600 nM of HFD100/300H was about 60% compared to the absence of protein. To assess effects of HER3 phosphorylation induced by HRGβ, increasing concentration of HFD100/300H from 0.3 nM to 600 nM was added to cells in the presence of HRGβ. The results showed that the HFD100/300H molecule dose-dependently inhibited HER3 phosphorylation of SK-BR3 cells stimulated by HRGI3 up to a concentration of about 67 nM where the level of inhibition reached a plateau. The maximal inhibition of HER3 phosphorylation of SK-BR3 cells achieved at concentrations ranging from 67 nM to 600 nM of HFD100/300H was about 65% compared to the absence of protein.

[1039] The effects of HFD100/300H on phosphorylation of HER1, HER2, and HER3 in SK-BR3 cells stimulated by either EGF or HRGβ was compared to 2C4 (also called pertuzumab), which is a monoclonal antibody that targets the dimerization domain of HER2. The results show that HFD100/300H (600 nM) inhibited phosphorylation of HER1 (about 60%), HER2 (about 65%) and HER3 (about 55%) in SK-BR3 cells stimulated by ligand. The 2C4 monoclonal antibody inhibited phosphorylation of HER2 (about 35%), HER3 (about 65%), but showed no detectable inhibition of HER1 phosphorylation. Thus, as compared to the 2C4 antibody, HFD100/300H is a pan-HER inhibitor capable of inhibiting HER1, HER2, and HER3 phosphorylation.

### 2. Proliferation

[1040] The effects of purified HFD100/300H on proliferation of cells stimulated by HER ligands was assessed as described in part B above. The results show that purified HFD100/300 (purified by protein A) inhibited proliferation of HT-29 cells stimulated by either of EGF (3 nM) or HRG (5 nM) in a dose dependent manner. The maximal inhibition of proliferation achieved at about 200 nM of HFD100/300 was about 55% as compared to the absence of protein in the presence of both ligands tested. The effects of purified HFD100/300H (containing a His tag) on proliferation of ZR 75-1 cells stimulated by ligands also was tested. The results show that purified HFD100/300H inhibited proliferation of ZR-75-1 cells stimulated by HRG in a dose dependent manner with maximal inhibition of about 80% observed at about 600 nM. HFD100/300H also dose-dependently inhibited proliferation of ZR-75-1 cells stimulated by EGF up to about 1 nM where the inhibition observed plateaued up to a concentration of about 600 nM HFD100/300H. The maximal inhibition observed at about 1 nM of purified HFD100/300H was about 80% as compared to the absence of protein.

### E. Summary of the Inhibitory Effects of HER ECD Derivatives on HER Phosphorylation

A variety of the exemplary HER ECD molecules were tested for their ability to inhibit HER phosphorylation. A summary of the results is set forth in Table 22 below. Where no determination of inhibitory effects is indicated, the experiment was not performed. The results show that the HER1-621/Fc:HER3-621/Fc chimera is a Pan-HER candidate molecule.

TABLE 22
Summary of Inhibitory Effects of Candidate HER ECD Derivatives

| | | | Receptor | | |
|---|---|---|---|---|---|
| HER | | | Phosphorylation | | |
| family | Name | Synonym | HER1 | HER2 | HER3 |
| HER1 | HF110T | HER1-501 | Y | Y | N |
| | HFD100T | HER1-621/Fc | Y | | |
| ERRP | HF120T | ERRP | Y | Y | |
| HER2 | HF210T | HER2-595 | | Y | Y |
| | HF220T | HER2-530 | | Y | Y |
| HER3 | HF300T | HER3-621 | N | | Y |
| | HF310T | HER3-500 | N | | Y |
| | HFD300T | HER3-621/Fc | | | Y |
| HER1/3 | HFDH1/H3 | HER1-621/ | Y | Y | Y |
| | (from CM) | Fc:HER3-621/Fc | | | |
| | HFDH1/H3 | HER1-621/ | Y | Y | Y |
| | (purified) | Fc:HER3-621/Fc | | | |

### Example 7

### Identification of the Ligand Binding Surfaces of HER1, HER3, HER4, and the Analogous Sequences of HER2

[1041] The identification of the approximate ligand binding region for all four members of the HER family was determined. The regions were determined by the crystal structure of human EGFR (residues 1-501) in complex with TGF-alpha (PDB protein data bank with 1D, 1MOX, see e.g., Garrett et al. (2002) Cell, 110: 763-773) and the multiple alignment of HER1 (SEQ ID NO:2), HER2 (SEQ ID NO:4), HER3 (SEQ ID NO:6), and HER4 (SEQ ID NO:8) in their mature forms (i.e., lacking the signal peptide as compared to the reference SEQ ID NOs). The identification of amino acids in domain I (DI) and domain III (DIII) important for ligand binding are depicted in Table 23. The numbering is according to the mature form of the HER protein. These sequences of amino acids can be targeted to interfere with binding of ligand to the respective HER protein.

TABLE 23
Identification of HER amino acid sequences
that confer ligand binding

| | DI | | DIII | |
|---|---|---|---|---|
| HER Protein | aa residues | SEQ ID NO | aa residues | SEQ ID NO |
| HER1 | S11-N128 | 54 | L325-I467 | 55 |
| HER2 | D9-R136 | 56 | R333-T475 | 57 |
| HER3 | L14-K132 | 58 | Q322-K466 | 59 |
| HER4 | E8-Q126 | 60 | Q321-R463 | 61 |

### Example 8

### Identification of Target Polypeptides in Subdomain II (DII) and Subdomain IV (DIV) of HER Family Molecules

[1042] In this Example, contiguous regions from HER3, and HER1, HER2, and HER4, were identified for use as substrates for peptide-binding (for use in, for example, phage display) or as immunogens to create multiclonal antibodies, to identify molecules that could target the subdomain II (DII) or subdomain IV (DIV) of the HER family. Such molecules serve as candidate pan-HER therapeutics to target dimerization domains and/or to target and stabilize tethering by interacting with DII and DIV sequences involved in tethering.

[1043] The sequences of domains DII or DIV among the HER family receptors were aligned (see, e.g., FIGS. 9A-B). HER3 was the prototype for homology analysis, and peptides conserved by sequence were identified as DII or DIV targets (see FIGS. 9A-B). Table 24 below depicts the identified target peptides in DII, with the SEQ ID NOs indicated in the adjacent column. Table 25 below depicts the identified target peptides in DIV, with the SEQ ID NO (#) indicated in the adjacent column.

TABLE 24
Exemplary Target Polypeptides in Domain II (DII)
HER Family

| Pep. # | HER3 | # | HER4 | # | HER1 | # | HER2 | # |
|---|---|---|---|---|---|---|---|---|
| 1.1.5 | CWGPGSEDCQ | 62 | CWGPTENNCQ | 63 | CWGAGEENCQ | 64 | CWGESSEDCQ | 65 |
| 2.1.1 | LTKTICAPQCNG | 66 | LTRTVCAEQCDG | 67 | LTKIICAQQCSG | 68 | LTRTVCAGGCA | 69 |
| 1.1.1 | NPNQCCH | 70 | YVSDCCH | 71 | SPSDCCH | 72 | LPTDCCH | 73 |
| 1.1.2 | ECAGGCSGPQD | 74 | ECAGGCSGPK | 75 | QCAAGCTGPRE | 76 | QCAAGCTGPKNS | 77 |
| | TDCFAC | | DTDCFAC | | SDCLVC | | DCLAC | |
| 1.1.6 | SGACVPRCPQPL | 78 | SGACVTQCPQTF | 79 | EATCKDTCPPLM | 80 | SGICELHCPALV | 81 |
| 1.1.3 | CPHNFVV | 82 | CPHNFVV | 83 | CPRNYVV | 84 | CPYNYLS | 85 |
| 2.1.4 | DQTSCVRACPPD | 86 | DSSSCVRACPSS | 87 | DHGSCVRACGAD | 88 | DHGSCVRACGAD | 89 |
| 1.1.4 | MEVDKNGLK | 90 | MEVEENGIK | 91 | YEMEEDGVR | 92 | QEVTAEDGTQ | 93 |

TABLE 25
Exemplary Target Polypeptides in Domain IV (DIV)
HER Family

| Pep. # | HER3 | # | HER4 | # | HER1 | # | HER2 | # |
|---|---|---|---|---|---|---|---|---|
| 1.2.1 | LCSSGGCWGPGP | 94 | LCSSDGCWGP | 95 | LCSPEGCWGP | 96 | LCARGHCWGPGP | 97 |
| | | | GP | | EP | | | |
| 1.2.5 | SCRNYSRGGV | 98 | SCRRFSRGRI | 99 | SCRNVSRGRE | 100 | NCSQFLRGQE | 101 |
| 1.2.2 | CNFLNGEPREF | 102 | CNLYDGEFREF | 103 | CNLLEGEPREF | 104 | CRVLQGLPREY | 105 |
| 1.2.6 | AHEAECF | 106 | ENGSICV | 107 | VENSECI | 108 | VNARHCL | 109 |
| 1.2.7 | TATCNGS | 110 | LLTCHGP | 111 | NITCTGR | 112 | SVTCFGP | 113 |
| 1.2.3 | GSTCAQCAHFRDGPHCV | 114 | GPDNCTKCS | 115 | GPDNCIQCAH | 116 | EADQCVACAHY | 117 |
| | | | HFKDGPNCV | | YIDGPHCV | | KDPPFCV | |
| 2.2.1 | IYKYPDVQN | 118 | IFKYADPDR | 119 | VWKYADAGH | 120 | IWKFPDEEG | 121 |
| 1.2.4 | CRPCHENCTQGC | 122 | CHPCHPNCT | 123 | CHLCHPNCTY | 124 | CQPCPINCTHSC | 125 |
| | | | QGC | | GC | | | |

### Example 9

Identification of Peptides by Phage Display that Bind Exposed, Conserved Residues in the HER Family

[1044] Phage display is exemplary of methods that can be used to screen for candidate therapeutics that interact with target polypeptides, such as those identified in Examples 7-8 and the identified target peptides set forth in any of SEQ ID NOs:54-125.

### A. Phage Library Selection

[1045] Phage display peptide libraries (constrained loop C7C library, and 7-aa and 12-aa linear libraries) were obtained from New England BioLabs. The phage display library was depleted against an irrelevant Fc fusion protein-protein A (or protein G) agarose complex. The depleted phage library was selected against human HER3-621/Fc-protein A agarose complex. The HER3-621/Fc which is the extracellular domain of HER3 fused with IgG1 Fc region was purchased from R&D systems, or prepared as described in Example 2. Phages were eluted with low pH buffer (or with synthetic peptide pools selected from sequence elements conserved in HER3 domains (see Example 6 and 7 above). Four rounds of selection were performed, after which individual plaque was picked up at random and subjected to analysis by phage enzyme-linked immunosorbent assay (ELISA) and DNA sequencing following amplification in E. co/i.

### B. Phage ELISA

[1046] To perform Phage ELISA, 96-well plates were coated with HER3-621/Fc; washed, and blocked with BSA/sucrose buffer. After blocking, individual phage culture medium are added to the wells and incubated for 2 hours at room temperature. Unbound phages are removed by repeated washing. Bound phages are detected using HRP conjugated M13 antibody (R&D Systems). Positive phage clones are screened further against individual synthetic peptides, which are selected from the HER3 extracellular domains conserved among the HER receptor family members (see Example 6 and 7 above), to determine the possible phage binding sites on HER3. Similar phage binding can be carried out using monolayer cells expressing HER3.

### C. Identification of Peptides for Heterodimerization

[1047] Once positive phages are identified and binding peptides determined, avidin-biotin interaction was used to identify synergistic peptide pairs suitable for heterodimerization. The assay exploits the ability of a single avidin molecule to bind four different biotin molecules with high affinity and specificity. Briefly, biotinylated peptide and neutravidin-RP were mixed at a ratio of 4:1. The mixture was incubated on a rotator at 4° C. for 60 minutes, followed by the addition of soft release avidin-Sepharose® resin to remove excess peptides. The soft release avidin Sepharose® was pelleted by centrifugation. The resulting supernatant was diluted to the desired concentration for HER3 binding assays.

### Example 10

Method for Cloning other HER Isoforms

### A. Preparation of Messenger RNA

[1048] mRNA isolated from major human tissue types from healthy or diseased tissues or cell lines were purchased from Clontech (BD Biosciences, Clontech, Palo Alto, Calif.) and Stratagene (La Jolla, Calif.). Equal amounts of mRNA were pooled and used as templates for reverse transcription-based PCR amplification (RT-PCR).

B. cDNA Synthesis

[1049] mRNA was denatured at 70° C. in the presence of 40% DMSO for 10 min and quenched on ice. First-strand cDNA was synthesized with either 200 ng oligo(dT) or ng random hexamers in a 20-1 reaction containing 10% DMSO, 50 mM Tris-HCl (pH 8.3), 75 mM KCl, 3 mM MgCl₂, 10 mM DTT, 2 mM each dNTP, 5 μg mRNA, and 200 units of StrataScript® reverse transcriptase (Stratagene, La Jolla, Calif.). After incubation at 37° C. for 1 h, the cDNA from both reactions were pooled and treated with 10 units of RNase H (Promega, Madison, Wis.).

### C. PCR Amplification

[1050] Forward and reverse primers for RT-PCR cloning were designed to clone splice variants of HER family members. Gene-specific PCR primers were selected using the Oligo 6.6 software (Molecular Biology Insights, Inc., Cascade, Colo.) and synthesized by Qiagen-Operon (Richmond, Calif). The forward primers (F1, F2) were selected flanking the start codon. The reverse primers (R1) were selected from intron sequences of HER genes (Table 26) using the method described by Hiller et al. (Genome Biology (2005), 6: R58) (see Table 27). Each PCR reaction contained 10 ng of reverse-transcribed cDNA, 0.2 μM F1/R1 primer mix, 1 mM Mg(OAc)₂, 0.2 mM dNTP (Amersham, Piscataway, N.J.), 1× XL-Buffer, and 0.04 U/μl rTth DNA polymerase (Applied Biosystems) in a total volume of 70 μl. PCR conditions were 36 cycles of 94° C. for 45 sec, 60° C. for 1 min, and 68° C. for 2 min. The reaction was terminated with an elongation step of 68° C. for 20 min.

TABLE 26
LIST OF GENES FOR CLONING CSR Isoforms

| | | Gene | | | SEQ | | | SEQ |
|---|---|---|---|---|---|---|---|---|
| | | SEQ ID | | Catalytic | ID | | | ID |
| Family | Member | NO. | nt ACC. # | Domain | NO. | ORF | Prt ACC.# | NO. |
| HER | EGFR | 400 | NM_005228 | 2380- | 1 | 247- | NP_005219 | 2 |
| | | | | 3148 | | 3879 | | |
| | ERBB2 | 401 | NM_004448 | 2396- | 3 | 239- | NP_004439 | 4 |
| | | | | 3164 | | 4006 | | |
| | ERBB3 | 402 | NM_001982 | 2318- | 5 | 194- | NP_001973 | 6 |
| | | | | 3086 | | 4222 | | |
| | ERBB4 | 403 | NM_005235 | 2285- | 7 | 34- | NP_005226 | 8 |
| | | | | 2953 | | 3960 | | |

TABLE 27
PRIMERS FOR PCR CLONING

| SEQ ID NO | Primer Name | Sequence |
|---|---|---|
| 276 | EGFR-F1 | ATC GGG AGA GCC GGA GCG AG |
| 277 | EGFR-F2 | AGC AGC GAT GCG ACC CTC CG |
| 278 | EGFR-int11R1 | CCA GGC TTT GGC TGT GGT CA |
| 279 | HER2-F1 | ATG GGG CCG GAG CCG CAG T |
| 280 | HER2-F2 | GCA CCA TGG AGC TGG CGG C |
| 281 | HER2-int11R1 | ATC AGG CCC CCT CTT TCT CAG |
| 282 | HER3-F1 | TCC CTT CAC CCT CTG CGG A |
| 283 | HER3-F2 | GCG GAG TCA TGA GGG CGA A |
| 284 | HER3-int11R1 | CTG AAG ATG CCA TTT CCT CCA TAC |
| 285 | HER3-int10R1 | CAA TTT ATG CCA GTG GTT CAC CTA |
| 286 | HER4-F1 | ATT GTC AGC ACG GGA TCT GAG A |
| 287 | HER4-F2 | CTG AGA CTT CCA AAA AAT GAA GCC |
| 288 | HER4-int12R1 | AAT GGG AAA AAA TTT AAG TTT CTA TGT T |

### D. Cloning and Sequencing of PCR Products

[1051] PCR products were electrophoresed on a 0.8% agarose gel, and DNA from detectable bands was stained with Gelstar™ (BioWhitaker Molecular Application, Walkersville, Md.). The DNA bands were extracted with the QIAquick® gel extraction kit (Qiagen, Valencia, Calif.), ligated into the pDrive UA-cloning vector (Qiagen), and transformed into DH10B cells. Recombinant plasmids were selected on LB agar plates containing 25 μg/ml kanamycin, 0.1 mM IPTG, and 60 μg/ml X-gal. For each transfection, 12 colonies were randomly picked, and their cDNA insert sizes were determined by PCR with UA vector primers. Clones were then sequenced from both directions with M13 forward and reverse vector primers. All clones were sequenced entirely using custom primers for directed sequencing completion across gapped regions.

### E. Sequence Analysis

[1052] Computational analysis of alternative splicing was performed by alignment of each cDNA sequence to its respective genomic sequence using SIM4 (a computer program for analysis of splice variants). Only transcripts with canonical (e.g., GT-AG) donor-acceptor splicing sites were considered for analysis. Clones encoding HER isoforms were studied further (see below, Table 28).

### F. Exemplary HER Isoforms

[1053] Exemplary HER isoforms, prepared using the methods described herein, are set forth below in Table 28. Nucleic acid molecules encoding HER isoforms are provided and sequences thereof are set forth under the SEQ IDs noted in the Table. The amino acid sequences of exemplary HER isoform polypeptides are set forth under the noted of SEQ IDs.

TABLE 28
HER Isoforms

| | | | | | SEQ |
|---|---|---|---|---|---|
| | | | | Primers | ID NOs |
| Gene | ID | Type | Length | Used | (nt, aa) |
| EGFR | HER1-int11 | Intron | 433 | EGFR-F1, | 126, 127 |
| | | fusion | | EGFR-F2, | |
| | | | | EGFR- | |
| | | | | int11R1 | |
| ERBB2 | HER2-int11 | Intron | 438 | HER2-F1, | 140, 141 |
| | | fusion | | HER2-F2, | |
| | | | | HER2- | |
| | | | | int11R1 | |
| ERBB3 | HER3-int10 | Intron | 403 | HER3-F1, | 145, 146 |
| | | fusion | | HER3-F2, | |
| | | | | HER3- | |
| | | | | int11R1 | |
| ERBB3 | HER3-int10 | Intron | 425 | HER3-F1, | 147, 148 |
| | | fusion | | HER3-F2, | |
| | | | | HER3- | |
| | | | | int10R1 | |
| ERBB4 | ERBB4- | Intron | 506 | HER4-F1, | 158, 159 |
| | int12_tr | fusion | | HER4-F2, | |
| | | | | HER4- | |
| | | | | int12R1 | |
| ERBB4 | ERBB4_int11 | Intron | 430 | | 156, 157 |
| | | fusion | | | |
| ERBB4 | ERBB4_int10 | Intron | 421 | | 154, 155 |
| | | fusion | | | |
| ERBB4 | ERBB4_int9 | Intron | 391 | | 152, 153 |
| | | fusion | | | |

### Example 11

Engineering for Higher Ligand Binding Affinity and Capacity panHER Ligand Traps: Structure-Based Mutagenesis of HER1 ECD

[1054] Higher affinity ECDs have been prepared. This was effected first by computer modeling using published co-crystal structure of EGF bound to EGFR (HER1) to optimize high affinity HER1/Fc towards its ligands. Crystal structure of the complex of human epidermal growth factor and receptor extracellular domains (Ogiso H et al. Cell (2002) 775-787) was used for computer-based optimization of the ligand-receptor interaction. The three-dimensional protein structures were from the Research Collaboratory for Structural Bioinformatics (RCSB)'s Protein Data Bank (www.rcsb.org/pdb). The designed optimization of ligand-receptor interaction was based on the physio-chemical properties and classification of amino acids such as charged, polar, aromatic, etc. Also considered were residue volume, surface area, solvent accessibilities, etc. PAM250 matrix was used to aid for the prediction of amino acid substitution (W. A Pearson, Rapid and Sensitive Sequence Comparison with FASTP and FASTA, in Methods in Enzymology, ed. R. Doolittle (ISBN 0-12-182084-X, Academic Press, San Diego) 183(1990)63-98; and also M. O. Dayhoff, ed., 1978, Atlas of Protein Sequence and Structure, Vol. 5).

### A. High-Throughput Mutagenesis

[1055] This was followed by single amino acid substitutions through mutagenesis, followed by expression and screening of clones for ligand binding activities towards EGF, HB-EGF, TGF-alpha, and amphiregulin (AR). A mutant with substitution in threonine at position 39 in HER1 to serine, called T39S, was predicted by modeling studies to give rise to high affinity, was screened and found to bind EGF, TGF-alpha, and HB-EGF. This HER1/Fc T39S mutant is called HFD120. Besides HFD120, several other mutants were made.

[1056] Overlapping PCR was performed using an Elongase® enzyme mix (Invitrogen) and Pfu polymerase (Stratagene) to introduce the designed point mutations into HFD100 (the template). The primers (SEQ ID NOs: 457 and 458, respectively, were

Forward primer EGFR-F1:
5′-AATTCGTACG ACCGCCACC ATG GGA CCCTCCGGGACGGCC-3′
Reverse primer EGFR-R1:
GGGGACCACTTTGT ACAAGAAAGCTGGGT CTA GGA CGG GAT CTT
AGG CCC A

[1057] 1st round PCR: HFD100 was used as PCR template. PCR was performed using Elongase® enzyme mix and Pfu polymerase with primersEGFR-F1 and EGFRmu_R2. The PCR conditions were 94° C. 2 min, 94° C. 45 sec, 60° C. 45 sec, 68° C. 3 min for 26 cycles. EGFR-R1, the conditions were 94° C. 2 min, 94° C. 45 sec, 60° C. sec, 68° C. 3 min for 26 cycles. After the amplification, PCR products were separated on 1% Agarose gel and purified using Qiagen® gel purification Kit. (Qiagen).

[1058] 2nd round PCR: The 1st round PCR products were mixed by molar ratio 1 to 1. PCR was performed using Elongase® enzyme mix and Pfu polymerase and the condition of 9° C. 2 min, 94° C. 45 sec, 57° C. 45 sec, 68° C. 30 min for 8 cycles.

[1059] 3rd round PCR: The 2nd round PCR products were used as template. PCR was performed using Elongase® enzyme mix and Pfu polymerase with primers EGFR-F1 and EGFR-R1. The PCR conditions were 94° C. 2 min, 94° C. 45 sec, 60° C. 45 sec, 68° C. 3 min for 26 cycles. PCR products were separated on 1% Agarose gel and purified using Qiagen® gel purification kit. Purified PCR products were subcloned into p221DONR vector.

TABLE 29
EGFR mu Primers Used for Mutational Analysis of HFD100 (see US Patent
Pub. No. 2010/0055093)

| Primer Name | Pos. bp | SEQ ID | Primer Sequence |
|---|---|---|---|
| EGFRmu01_R2 | 138 | 459 | CTC TGG AGG CTG AGA AAA TGT TCT TCA AAA GTG |
| | | | CCC AAC TGC G |
| EGFRmu02_R2 | 137 | 460 | CTC TGG AGG CTG AGA AAA TGA TTT TCA AAA GTG CCC |
| | | | AAC TGC G |
| EGFRmu04_R2 | 124 | 462 | TGA GAA AAT GAT CTT CAA AAG TGT TCA ACT GCG TGA |
| | | | GCT TGT TAC |
| EGFRmu05_R2 | 124 | 463 | CTC TGG AGG CTG AGA AAA TGT TCT TCA AAA GTG |
| | | | TTC AAC TGC GTG AGC TTG TTA C |
| EGFRmu06_R2 | 121 | 464 | AAA ATG ATC TTC AAA AGT GCC CAC CTG CGT GAG |
| | | | CTT GTT ACT CG |
| EGFRmu07_R2 | 121 | 465 | GAA AAT GAT CTT CAA AAG TGC CAA TCT GCG TGA GCT |
| | | | TGT TAC TC |
| EGFRmu08_R2 | 277 | 466 | GAA TTC GCT CCA CTG TGT TGA CGG CAA TGA GGA |
| | | | CAT AAC CAG |
| EGFRmu09_R2 | 277 | 467 | GAA TTC GCT CCA CTG TGT TGA TGG CAA TGA GGA |
| | | | CAT AAC CAG |
| EGFRmu10_R2 | 205 | 468 | AAA GAT CAT AAT TCC TCT GCA CCC AGG TAA TTT |
| | | | CCA AAT TCC CA |
| EGFRmu11_R2 | 338 | 469 | CTG CPA AGG CAT AGG AAT TTT CCC AGT ACA TAT |
| | | | TTC CTC TGA TGA T |
| EGFRmul2_R2 | 342 | 470 | GAC TGC TAA GGC ATA GGA ATT ATC GTA GTA CAT ATT |
| | | | TCC TCT GA |
| EGFRmul3_R2 | 340 | 471 | ACT GCT AAG GCA TAG GAA TTT TGG TAG TAC ATA |
| | | | TTT CCT CTG ATG |
| EGFRmul4_R2 | 367 | 472 | GGT TTT ATT TGC ATC ATA GTT AGC TAA GAC TGC |
| | | | TAA GGC. ATA GGA |
| EGFRmu15_R2 | 367 | 473 | GGT TTT ATT TGC ATC ATA GTT AGT TAA GAC TGC |
| | | | TAA CGC. ATA CS1A |
| EGFRmu16_R2 | 128 | 474 | GGC TGA GAA AAT GAT CTT CAA ATT ′roc CCA ACT |
| | | | GCG TGA GCT T |
| EGFRmu17_R2 | 128 | 475 | GGC TGA GAA AAT GAT CTT CAA ATT GGC CCA ACT GCG |
| | | | TGA GCT T |
| EGFRmu18_R2 | 129 | 476 | GGC TGA GAA AAT GAT CTT CAA AAA TGC CCA ACT GCG |
| | | | TGA GCT |
| EGFRmu19_R2 | 128 | 477 | GGC TGA GAA AAT GAT CTT CAA AAT CGC CCA ACT |
| | | | GCG TGA GCT T |
| EGFRmu20_R2 | 128 | 478 | GGC TGA GAA AAT GAT CT CAA AAT AGC CCA ACT GCG |
| | | | TGA GCT T |
| EGFRmu21_R2 | 128 | 479 | GGC TGA GAA AAT GAT CT CAA AAC CGC CCA ACT |
| | | | GCG TGA GCT T |
| EGERmu22_R2 | 128 | 480 | GGC TGA GAA AAT GAT CT CAA AAA GGC CCA ACT |
| | | | GCG TGA GCT T |
| EGFRmu23_R2 | 145 | 481 | GAA CAT CCT CTG GAG GCT GGC AAA ATG ATC TTC AAA |
| | | | AGT GCC CA |
| EGFRmu24_R2 | 145 | 482 | TTG AAC ATC CC TGG AGG CC CAA AAA TGA TCT TCA |
| | | | AAA GTC CCC |
| EGFRmu25_R2 | 149 | 483 | TEA TTG AAC ATC CTC TGG AGG GTG AGA AAA TGA |
| | | | TCT TCA AAA GTG |
| EGFRmu26_R2 | 148 | 484 | TAT TGA ACA TCC TCT GGA GGA GGA GAA AAT GAT CT |
| | | | CAA AAG TGC |
| EGFRmu27_R2 | 145 | 485 | GTT ATT GAA CAT CCT CTG GAG GAG Gee AAA ATG ATC |
| | | | TTC AAA AGT GCC C |
| EGFRmu28_R2 | 145 | 486 | GTT ATT GAA CAT CCT CTG GAG TTG GGC AAA ATG |
| | | | ATC TTC AAA AGT GCC C |
| EGFRmu29_R2 | 148 | 487 | TTA TTG AAC ATC CTC TGG AGG GCG AGA AAA TGA TCT |
| | | | TCA AAA GTG C |
| EGERmu30_R2 | 145 | 488 | TTA TTG AAC ATC CTC TGG AGG GCG TAA AAA TGA |
| | | | TCT TCA AAA GTG CCC A |
| EGFRmu3l_R2 | 145 | 489 | TTA TTG AAC ATC CTC TGG AGG GCG -ETA AAA TGA |
| | | | TCT TCA AAA GTG CCC. |
| EGFRmu32_R2 | 118 | 490 | TGA TCT TCA AAA GTG CCC AAC TCC GTG AGC TTG |
| | | | TTA CTC GTC CC |
| EGFRmu33_R2 | 118 | 491 | TGA TCT TCA AAA GTG CCC AAC GAC GTG AGC TTG |
| | | | TTA CC GTG C |
| EGFRmu34_R2 | 118 | 492 | GAT CTT CAA AAG TGC CCA ACT TCG TGA GCT TGT |
| | | | TAC TCG TGC |
| EGFRmu35_R2 | 118 | 493 | ATG ATC TTC AAA AGT GCC CAA GTA CGT GAG CTT |
| | | | GTT ACT CGT G |
| EGFRmu36_R. | 115 | 494 | CTT CAA AAG TGC CCA ACT GCG AGA GCT TGT TAC |
| | | | TCG TGC CTT |
| EGFRmu37_R2 | 116 | 495 | CTT CAA AAG TGC CCA ACT GCT TGA GCT TGT TAC |
| | | | TCG TGC CTT |
| EGFRmu38 1t2 | 115 | 496 | CTT CAA AAC1TGC CCA ACT GCT CGA GCT TGT TAC |
| | | | TCG TGC CTT |
| EGFRmu39 R2 | 115 | 497 | ATC TTC AAA AGT GCC CAA CTG ATA GAG CTT GTT |
| | | | ACT CGT GCC |
| EGFRmu40 R. | 100 | 498 | ACT GCT TGA GCT TGT TAC TCT GGC CTT GGC AAA |
| | | | CTT TCT TTT C |
| EGFRmu41_R2 | 1300 | 499 | CGA CTG CAA GAG AAA ACT G?C GAT GTT GCT TGG TCC |
| | | | TGC CG |
| EGFRmu42 R2 | 1300 | 500 | ACG ACT GCA AGA GAA AAC TGA TTA TGT TGC TTG GTC |
| | | | CTG CCG |
| EGFRmu43_Ft2 | 1393 | 501 | GCA TAG CAC AAA TTT TTG TTT CGT CAA ATT ATC |
| | | | ACA TCT CCA TC |
| EGFRmu44_R2 | 1393 | 502 | TTT GCA TAG CAC AAA TTT TTG TTA TGT GAA ATT |
| | | | ATC ACA TCT CCA TC |
| EGFRmu45_R2 | 146 | 503 | TTG AAC ATC CTC TGG AGG CTT TGA AAA TGA TCT |
| | | | TCA AAA GTG CC |
| EGFRmu46_R2 | 1109 | 504 | AAA TGC CAC CGG CAG GAT GCG GAG ATC GCC ACT |
| | | | GAT GGA |
| EGFRmu06_R2 | 121 | 505 | GAG TCA. CCC CTA AAT GCC ACC GGC AGG ATG TGG |
| | | | AGA TCG |
| EGFRmu07 R2 | 121 | 506 | TGT GAA GGA GTC ACC CCT ATG TGC CAC CGG CAG |
| | | | GAT GTG |
| EGFRmu49_R2 | 1132 | 507 | GAG TAT GTG TGA AGG AGT CAG CCC TAA ATG CCA |
| | | | CCG GCA |
| EGFRmu06_R2 | 121 | 508 | GAG TAT GTG TGA AGG AGT CAT TCC TAA ATG CCA CCG |
| | | | GCA G |
| EGFRmu07_R2 | 121 | 509 | CCG TCC TGT TTT CAG GCC ATT CCT GAA TCA GCA |
| | | | AAA ACC CT |
| EGFRmu52_R2 | 1226 | 510 | CCG TCC TGT TTT CAG GCC ATT CCT GAA TCA GCA |
| | | | AAA ACC CT |
| EGFRmu53_R2 | 1228 | 511 | GTC CGT CCT GTT TTC AGG CTC AGC CTG AAT CAG |
| | | | CAA AAA CC |
| EGFRmu54_R2 | 1330 | 512 | GTA ATC CCA AGG ATG TTA TGT CCA GGC TGA CGA |
| | | | CTG CAA GA |
| EGFRmu55_R2 | 1472 | 513 | CTG TTT TCA CCT CTG TTG CTT TTA ATT TTG GTT |
| | | | TTC TGA CCG G |
| EGFRmu56 R2 | 1459 | 514 | TCT GTT GCT TAT AAT TTT GGT TTC CTG ACC GGA |
| | | | GGT CCC AAA C |
| EGFRmu06 R2 | 121 | 515 | TCT GTT GCT TAT AAT TTT GGT TTG CTG ACC GGA |
| | | | GGT CCC AAA C |
| EGFRmu07_R2 | 121 | 516 | GCA GCT GTT TTC ACC TCT GTT TTT TAT AAT TTT |
| | | | GGT TTT CTG ACC G |
| EGFRmu59_R2 | 166 | 517 | CCA ACC ACC ACC TCA CAC TTT TCG AAC ATC CTC |
| | | | TGG AGG CTG |
| EGFRmu60_R2 | 160 | 518 | CCA CCT CAC AGT TAT TGA. ACA GCC TCT GGA GGC |
| | | | TGA GAA AAT |
| EGFRmu61_R2 | 160 | 519 | CCA AGG ACC ACC TCA CAG TTT TCG TAC AGC CTC |
| | | | TGG AGG CTG AGA AAA |
| EGFRmu62_R2 | 127 | 520 | GAG GCT GAG AAA ATG ATC TTC AGC ATC GCC CAA CTG |
| | | | CGT GAG CTT |
| EGFRmu63_R2 | 127 | 521 | TCT GGA GGC TGA GAA AAT GAT TTT CAG CAT CGC |
| | | | CCA ACT GCG TGA GCT T |
| EGFRmu64_R2 | 95 | 522 | TGA GCT TGT TAC TCG TGC CTG GCC AAA CTT TCT |
| | | | TTT CCT CCA |
| EGFRmu65 R2 | 283 | 523 | TCC AGG TTT TCC AAA GGA ATT CTC GAA AAT TCG |
| | | | TTG AGG GCA ATG AGG ACA |
| EGFRmu66_R2 | 314 | 524 | GTA CAT ATT TCC TCT GAT GAT CCG CAG GTT TTC |
| | | | CAA AGG AAT TC |
| EGFRmu67_R2 | 329 | 525 | AAG GCA TAG GAA TTT TCG TAG ACC TGA TTT CCT |
| | | | CTG ATG ATC TGC AGT |
| EGFRmu68_R2 | 364 | 526 | CGG TTT TAT TTG CAT CAT AGT TTA ACA TGA CTG |
| | | | CTA AGG CAT AGG AAT |
| EGFRmu69_R2 | 407 | 527 | CAT GCA GGA TTT CCT GTA AAT TTG TCA GGC GCA |
| | | | GCT CCT TCA GTC CGG |
| EQFRmu70_R2 | 448 | 528 | CGT TGC ACA GGG CAG GGT TCT TTT CGA TCC GCA |
| | | | CGG CGC CAT GCA |
| EGFRmu71_R2 | 460 | 529 | TGC TCT CCA CGT TGC ACA GTT TAT CGT TGT TGC |
| | | | TGA ACC GCA CG |
| EQFRmu72_R2 | 472 | 530 | CCA CTG GAT GCT CTC CAC GTG GCA CAG GGC AGG GTT |
| | | | GTT G |
| EGFRmu73_R2 | 202 | 531 | AGA TCA TAA TTC CTC TGC ACA AGG ACA ATT TCC |
| | | | AAA TTC CCA AGG AC |
| EGERmu74_R2 | 202 | 532 | AGA AGG AAA GAT CAT AAT TCC TCC CCG TAA GGA CAA |
| | | | TTT CCA AAT TCC CAA GGA C |
| EGFRmu75_R2 | 286 | 533 | GTT TTC CAA AGG AAT TCG CTC AAA TGT GTT GAG |
| | | | GGC AAT GAG GA |
| EGFRmu76_R2 | 286 | 534 | TGC AGG TTT TCC AAA GGA ATT GAC TCA AAT GTG |
| | | | TTG AGG GCA ATG AGG A |
| EGEmu77_R2 | 283 | 535 | TGC AGG TTT TCC AAA GGA ATT GTC GAA AAT TCG |
| | | | TTG AGG GCA ATG AGG ACA |
| EGERmu78_R2 | 364 | 536 | CGG TTT TAT TTG CAT CAT AGT TAA ACA TGA CTG |
| | | | CTA AGG CAT AGG AAT |
| EGFRmu79_R2 | 364 | 537 | GTT CAG TCC GGT TTT ATT TGC ATT ATA GTT AAA |
| | | | CAT GAC TGC TAA GGC ATA GGA ATT |
| EGFRmu80 R2 | 448 | 538 | AGG GCA GGG TTG TTG CTG ATC CGC ACG GCG CCA |
| | | | TGC A |
| EGFRmu81_R2 | 448 | 539 | CCA CGT TGC ACA GGG CAG GCT TGT TGC TGA TCC GCA |
| | | | CGG CGC CAT GCA |
| EGFRmu82_R2 | 103 | 540 | CCA ACT GCG TGA GCT TGT TAA GCG TGC CTT GGC |
| | | | AAA CTT TCT |
| EGFRmu83_R2 | 103 | 541 | CCA ACT GCG AGA GCT TGT TAA GCC1TGC CTT GGC |
| | | | AAA CTT TCT T |
| EGFRmu84 R2 | 127 | 542 | TCC TCT GGA GGC TGA GAA ATT QAT TTT CAG CAT |
| | | | CGC CCA ACT GCT TGA GCT T |
| EGFRmu85_R2 | 127 | 543 | CAT CCT CTG GAG GCT GAG ATA. TTG All′TTC AGC |
| | | | ATC GCC CAA CTG CGT GAG CTT |
| EGFRmu86_R2 | 124 | 544 | GGC TGA GAA AAT GAT CTT CAA AAC CGT TCA ACT GCG |
| | | | TGA GCT TGT TAC |
| EGFRmu87_R2 | 124 | 545 | AGG CTG AGA AAA TGA TCT TCA TAA CCG TTC AAC |
| | | | TGC GTG AGC TTG TTA C |
| EGFRmu88_R2 | 124 | 546 | GAG GCT GAG AAA ATG ATC TTC ATA ATT GTT CAA |
| | | | CTG CGT GAG CTT GTT AC |
| EGFRmu89_R2 | 1471 | 547 | GCA GCT GTT TTC ACC TCT GTT TTT TTG AAT TTT |
| | | | GGT TTT CTG ACC GGA G |
| EGFRmu90_R2 | 1297 | 548 | CGA CTG CAA GAG AAA ACT GAC GAA CTT GCT TGG TCC |
| | | | TGC CGC G |
| EGFRmu91_R2 | 507 | 549 | ACA TGT TGC TGA GAA AGT CAC CCC TGA CTA TGT |
| | | | CCC GCC ACT |
| EGFRmu92 R2 | 514 | 550 | GTC GTT CTG GAA GTC CAT CAC GAT CTC GGC GTC |
| | | | ACG GTC ACT GCT GAC TAT GTC C |
| EGFRmu93 R2 | 532 | 551 | GCA GCT GCC CAG GTG GTT GTC GCC TTT CAC CGA |
| | | | CAT GTT GCT GAG AAA GTC |
| EGFRmu94_R2 | 118 | 552 | TGA GAA AAT GAT CTT CAA AAG TGT CCA AGT ACG TGA |
| | | | GCT TGT TAC TCG TGC |
| EGFRmu95_R2 | 115 | 553 | GAT CTT CAA AAG TGC CCA ACT CAT AGA GCT TGT |
| | | | TAC TCG TGC CTT |
| EGFRmu96 R2 | 337 | 554 | GAC TGC TAA GGC ATA GGA ATT ATC GTG GTA CAT |
| | | | ATT TCC TCT GAT GAT CTG |
| EGFRmu01_F2 | 1725 | 555 | CGC AGT TGG GCA CTT TTG AAG AAC ATT TTC TCA |
| | | | GCC TCC AGA G |
| EGFRmu02_F2 | 1726 | 556 | CGC AGT TGG GCA CTT TTG AAA ATC ATT TTC TCA |
| | | | GCC TCC AGA G |
| EGERmu03_F2 | 1726 | 557 | CGC AGT TGG GCA CTT TTG AAC AAC ATT TIC TCA |
| | | | GCC TCC AGA G |
| EGFRmu04_F2 | 1739 | 558 | GTA ACA AGC TCA CGC AGT TGA ACA CTT TTG AAG |
| | | | ATC ATT TTC TCA |
| EGFRmu05_F2 | 1739 | 559 | GTA ACA ACC TCA CGC AGT TGA ACA CET TTG AAG |
| | | | AAC ATT TTC TCA GCC TCC AGA G |
| EGFRmu06_F2 | 1736 | 560 | CGA GTA ACA AGC WA CGC AGG TGG GCA CET TM AAG |
| | | | ATC ATT TT |
| EGFRmu07_F2 | 1736 | 561 | GAG TAA CAA GCT CAC GCA GAT TGG CAC TTT TGA |
| | | | AGA TCA TTT TC |
| EGFRmu08_F2 | 1586 | 562 | CTG GTT ATG TCC TCA TTG CCG TCA ACA CAG TGG |
| | | | AGC GAA TTC |
| EGERmu09_E2 | 1586 | 563 | CTG GTT ATG TCC TCA TTG CCA TCA ACA CAG TGG |
| | | | AGC GAA TTC |
| EGFRmu10_F2 | 1658 | 564 | TGG GAA TTT GGA AAT TAC CTG GGT GCA GAG GAA |
| | | | TTA TGA TCT TT |
| EGFRmu11_F2 | 1525 | 565 | ATC ATC AGA GGA AAT ATG TAC TGG GAA AAT TCC |
| | | | TAT GCC TTA GCA G |
| EGFRmu12_F2 | 1521 | 566 | TCA GAG GAA ATA TGT ACT ACG ATA ATT CCT ATG |
| | | | CCT TAG CAG TC |
| EGFRmu13_F2 | 1519 | 567 | CAT CAG AGG AAA TAT GTA CTA CCA AAA TTC CTA TGC |
| | | | CTT AGC AGT |
| EGFRmu14_F2 | 1496 | 568 | TCC TAT GCC TTA GCA GTC TTA GCT AAC TAT GAT |
| | | | GCA AAT AAA ACC |
| EGFRmu15_F2 | 1496 | 569 | TCC TAT GCC TTA GCA GTC TTA ACT AAC TAT GAT |
| | | | GCA AAT AAA ACC |
| EGFRmu16_F2 | 1735 | 570 | AAG CTC ACG CAG TTG GGC AAA TTT GAA GAT CAT |
| | | | T17 CT(′AGC C |
| EGRmu17_E2 | 1735 | 571 | AAG CTC ACG CAG TTG GGC CAA TTT GAA GAT CAT |
| | | | TTT CTC AGC C |
| EGERmu18_F2 | 1734 | 572 | AGC TCA CGC ACT TGG GCA TTT TTG AAG ATC ATT |
| | | | TTC TCA GCC |
| EGFRmu19F2 | 1735 | 573 | AAG CTC ACG CAG TTG GGC GAT TTT GAA GAT CAT |
| | | | TTT CTC AGC C |
| EGERmu20_F2 | 1735 | 574 | AAG CTC ACG CAG TTG GGC TAT TTT GAA GAT CAT |
| | | | TTT CTC AGC C |
| EGFRmu21_F2 | 1735 | 575 | AAG CTC ACG CAG TTG GGC GGT TTT GAA GAT CAT |
| | | | TTT CTC AGC C |
| EGFRmu22_F2 | 1735 | 576 | AAG CTC ACG CAG TTG GGC CT ′TTT GAA GAT CAT |
| | | | TTT CTC AGC C |
| EGFRmu23_F2 | 1718 | 577 | TGG GCA CTT 170 AAG ATC ATT no CCA GCC TCC AGA |
| | | | GGA TGT TC |
| EGFRmu24.F2 | 1718 | 578 | TGG CAC TTT TGA AGA TCA TTT TTG GAG CCT CCA |
| | | | GAG GAT GTE CAA |
| EGFRmu25_E2 | 1722 | 579 | CAC TTT TGA AGA TCA TTT TCT CAC CCT CCA GAG |
| | | | GAT GTT CAA TAA |
| EGFRmu26_,F2 | 1722 | 580 | GCA C17 TM AAG ATC ATE TTC TCC TCC TCC AGA |
| | | | GGA TGT TCA ATA |
| EGFRmu27_F2 | 1718 | 581 | GGG CAC TTT TGA AGA TCA TTT TGC CCT CCT CCA |
| | | | GAG GAT an CAA TAA C |
| EGFRmu28_F2 | 1718 | 582 | GGG CAC TTT TGA AGA TCA ′TTT TGC CCA ACT CCA |
| | | | GAG GAT GTT CAA TAA C |
| EGFRmu29_,F2 | 1722 | 583 | GCA CTT TGA AAG ATC ATE TTC TCG CCC TCC AGA |
| | | | GGA TGT TCA ATA A |
| EGFRmu30_F2 | 1718 | 584 | TGG GCA CT TTG AAG ATC ATT TTT ACG CCC TCC |
| | | | AGA GGA TGT TCA ATA A |
| EGFRmu31_F2 | 1718 | 585 | GGG CAC TTT TGA AGA TCA TTT TAA CGC CCT CCA |
| | | | GAG GAT GTT CAA TAA |
| EGIFRmu32_F2 | 1745 | 586 | GGC ACG AGT AAC AAG CTC ACG GAG TTG GGC ACT |
| | | | TTT CAA GAT CA |
| EGFRmu33_F2 | 1745 | 587 | GCA CGA GTA ACA AGC TCA CGT CGT TGG GCA CTT |
| | | | TTG AAG ATC A |
| EGERmu34_F2 | 1745 | 588 | GCA CGA GTA ACA AGC TCA CGA AGT TGG GCA CTT |
| | | | TTG AAG ATC |
| EGERmu35_F2 | 1745 | 589 | CAC GAG TAA CAA GCT CAC GTA CTT GGG CAC TTT |
| | | | TGA AGA TCA T |
| EGFRmu36_F2 | 1742 | 590 | AAG GCA CGA GTA ACA AGC TCT CGC AGT TGG GCA |
| | | | CTT TTG AAG |
| EGFRmu37_,F2 | 1743 | 591 | AAG GCA CGA GTA ACA AGC TCA AGC AGT TGG GCA |
| | | | CTT TTG AAG |
| EGFRmu38_F2 | 1742 | 592 | AAG GCA CGA GTA ACA AGC TCG AGC AGT TGG GCA |
| | | | CTT no AAG |
| EGFRmu39_F2 | 1742 | 593 | GGC ACG AGT AAC AAG CTC TAT CAG TTG GGC ACT |
| | | | TTT GAA GAT |
| EGFRmu40_F2 | 1763 | 594 | GAA AAG AAA GTT TGC CAA GGC CAG AGT AAC AAG CTC |
| | | | ACG CAG T |
| EGFRmu41_F2 | 563 | 595 | CGG CAG CAC CAA GCA ACA TCG TCA GTT TTC TCT |
| | | | TGC AGT CG |
| EGFRmu42_,F2 | 563 | 596 | CGG CAG G?C CAA GCA ACA TAA TCA GTT TTC TCT |
| | | | TGC ACT CGT |
| EGFRmu43_F2 | 470 | 597 | GAT GGA GAT GTG ATA ATT TCA CGA AAC AAA AAT |
| | | | TTG TGC TAT GC |
| EGFRrau4ALF2 | 470 | 598 | GAT GGA GAT GTG ATA ATT TCA CAT AAC AAA AAT -no |
| | | | TGC TAT GCA AA |
| EGFRmu45_F2 | 1717 | 599 | GGC ACT TTT GAA GAT CAT TTT CAA AGC CTC CAG |
| | | | AGG ATG TTC AA |
| EGFRmu46_F2 | 754 | 600 | TCC ATC AGT GGC GAT CTC CGC ATC CTG CCG GTG |
| | | | GCA TTT |
| EGFRmu47_F2 | 743 | 601 | CGA TCT CCA CAT CC GCC GCT GGC ATT TAG GGG |
| | | | TGA CT |
| EGFRtmu48_F2 | 737 | 602 | CAC ATC CTG CCG GTG GCA CAT AGG GGT GAC TCC |
| | | | TTC ACA |
| EGFRmu49_F2 | 731 | 603 | TGC CGG TGG CAT TTA GGG CTG ACT CCT TCA CAC |
| | | | ATA CTC |
| EGFRmu50_F2 | 731 | 604 | CTG CCG GTG GCA TTT AGG AAT GAC TCC TTC ACA |
| | | | CAT ACT C |
| EGFRmu51_F2 | 637 | 605 | AGG GTT TTT GCT GAT TCA GGA ATG GCC TGA AAA |
| | | | CAG GAC GG |
| EGFRmu52_F2 | 637 | 606 | AGG GTT TTT GCT GAT TCA GGA TTG GCC TGA AAA |
| | | | CAG GAC GG |
| EGFRmt153F2 | 635 | 607 | GGT TTT TGC TGA TTC AGG CTG AGC CTG AAA ACA |
| | | | GGA CGG AC |
| EGFRmu54_F:2 | 633 | 608 | TCT TGC AGT CGT CAG CCT GGA CAT AAC ATC CTT |
| | | | GGG ATT AC |
| EGFRruu55_F2 | 391 | 609 | CCG GTC AGA AAA CCA AAA TTA AAA GCA ACA GAG GTG |
| | | | AAA ACA G |
| EGFRmu56_F2 | 404 | 610 | GTT MG GAC CC CGG TCA GGA AAC CAA AAT TAT AAG |
| | | | CAA CAG A |
| EGFRmu57_F2 | 404 | 611 | GTT TGG GAC CTC CGG TCA GCA AAC CAA AAT TAT |
| | | | AAG CAA CAG A |
| EGFRmu5S_F2 | 388 | 612 | CGG TCA GAA AAC CAA AAT TAT AAA AAA CAG AGG TGA |
| | | | AAA CAG CTG C |
| EGFRmu59_F2 | 1697 | 613 | CAG CCT CCA GAG GAT GTT CGA AAA CTG TGA GGT |
| | | | GGT CCT TGG |
| EGERmu60_F2 | 1703 | 614 | ATT TTC TCA GCC TCC AGA GGC TGT TCA ATA ACT |
| | | | GTG AGG TGG |
| EGFRmu61_F2 | 1703 | 615 | TTT TCT CAG CCT CCA GAG GCT GTA CGA AAA CTG |
| | | | TGA GGT GGT CCT TGG |
| EGFRmu62_F2 | 1736 | 616 | AAG CTC ACG CAG TTG GGC GAT GCT GAA GAT CAT |
| | | | TTT CTC AGC CTC |
| EGFRmu63_F2 | 1736 | 617 | AAG CC ACG CAG TTG GGC GAT GCT GAA AAT CAT |
| | | | TTT CTC ACC CTC CAG A |
| EGFRmu64_F2 | 1768 | 618 | TGG AGG AAA AGA AAG TTT GCC CAG GCA CGA GTA ACA |
| | | | AGC TCA |
| EGFRmu65_F2 | 1580 | 619 | TGT CCT CAT TGC CCT CAA CGA ATT TTC GAC AAT |
| | | | TCC TTT GGA AAA CCT GCA |
| EGFRmu66_F2 | 1549 | 620 | GAA TTC CTT TGG AAA ACC TGC GGA TCA TCA GAG |
| | | | GAA ATA TGT AC |
| EGFRmu67_F2 | 1534 | 621 | CCT GCA GAT CAT CAG AGG AAC TCA GGT CA CGA AAA |
| | | | TTC CA TGC CTT |
| EGFRmu68_F2 | 1499 | 622 | ATT CCT ATG CCT TAG CAG TCA TGT TAA ACT ATG ATG |
| | | | CAA ATA AAA CGG |
| EGFRmu69_F2 | 1456 | 623 | CCG GAC TGA AGG AGC TGC GCC TGA CAA ATT TAC |
| | | | AGG AAA TCC TGC ATG |
| EGFRmu70_F2 | 1415 | 624 | TGC ATG GCG CCG TCC CCA TCG AAA AGA ACC CTG |
| | | | CCC TGT GCA ACG |
| EGERmu71_F2 | 1403 | 625 | CGT GCG GTT CAG CAA CAA CGA TAA ACT GTG CAA |
| | | | CGT GGA GAG CA |
| EGFRmu72_F2 | 1391 | 626 | CAA CAA CCC TCC CCT GTG CCA CGT GGA GAG CAT |
| | | | CCA GTG G |
| EGFRmu73_F2 | 1661 | 627 | GTC CTT GGG AAT TM GAA ATT GTC CTT GTG CAG |
| | | | AGG AAT TAT GAT CT |
| EGERmu74_F2 | 1661 | 628 | GTC CTT GGG AAT ′TTG GAA ATT GTC CM ACG GGG |
| | | | AGG AAT TAT GAT CTT TCC TTC T |
| EGFRmu75_F2 | 1577 | 629 | TCC TCA TTG CCC TCA ACA CAT TTG AGC GAA TIC |
| | | | CTT TGG AAA AC |
| EGFRmu76_F2 | 1577 | 630 | TCC TCA TTG CCC TCA ACA CAT TIC AGT CAA TTC |
| | | | CTT TGG AAA ACC TGC A |
| EGFRmu77_F2 | 1580 | 631 | TGT CTT CAT TGC CCT CAA CGA An TTC GAC AAT TCC |
| | | | TTT GGA AAA CCT GCA |
| EGFRmu78_F2 | 1499 | 632 | ATT CCT ATG CCT TAG CAG TCA TGT TTA ACT ATG |
| | | | ATG CAA ATA AAA CCG |
| EGFRmu791_F2 | 1499 | 633 | AAT TCC TAT GCC TTA GCA GTC ATG TTT AAC TAT |
| | | | AAT GCA AAT AAA ACC GGA CTG AAG |
| ECFRmu80_F2 | 1415 | 634 | TGC ATG CCC CCG TGC GGA TCA CCA ACA ACC CTG CC(′T |
| EGFRmu81_F2 | 1415 | 635 | TGC ATG GCG CCG TGC GGA TCA GCA ACA AGC cm |
| | | | CCC TGT GCA ACG TGG |
| EGFRmu82_F2 | 1760 | 636 | AGA AAG TTT GCC AAG GCA CGC TTA ACA AGC TCA |
| | | | CGC AGT TGG |
| EGFRmu83_F2 | 1760 | 637 | AAG AAA GTT TGC CAA GGC ACG CTT AAC AAG CTC |
| | | | TCG CAC TTG G |
| EGFRmu84_F2 | 1736 | 638 | AAG CTC ACG CAG TIC GGC GAT GCT GAA AAT CAA |
| | | | TTT CTC AGC GTC CAG AGG A |
| EGFRmu85 F2 | 1736 | 639 | AAG CTC ACG CAG TTG GGC GAT GCT GAA. AAT CAA |
| | | | TAT CTC AGC CTC CAG AGG ATG |
| EGFRmu86_F2 | 1736 | 640 | CIA ACA AGC TCA CGC AGT TGA ACG GTT ATG AAG |
| | | | ATC ATT TTC TCA GCC |
| EGFRmu87 F2 | 1736 | 641 | GTA ACA AGC TCA CGC AGT TGA ACG GTT ATG AAG |
| | | | ATC ATT TTC TCA GCC T |
| EGFRmu88_F2 | 1736 | 642 | GTA ACA AGC TCA CGC AGT TGA ACA ATT ATG AAG |
| | | | ATC ATT TTC TCA GCC TC |
| EGFRmu89 F2 | 392 | 643 | CTC CGG TCA GAA AAC CAA AAT TCA AAA AAA CAG AGG |
| | | | TGA AAA CAG CTG C |
| EGFRmu90_F2 | 566 | 644 | CGC GGC AGG ACC AAG CAA GTT CGT CAG TTT TCT |
| | | | CCT GCA GTC G |
| EGFRmu91 F2 | 1356 | 645 | AGT GGC GGG ACA TAG TCA GGG GTG ACT TTC TCA |
| | | | GCA ACA TGT |
| EGFRmu92_F2 | 1349 | 646 | GGA CAT AGT CAG CAG TGA CCG TGA CGC CGA GAT |
| | | | CGT GAT GGA CTT CCA GAA CCA C |
| EGFRmu93 F2 | 1331 | 647 | GAC TTT CTC AGC AAC ATG TCG GTG AAA GGC GAC |
| | | | AAC CAC CTG GGC AGC TGC |
| EGFRmu94_F2 | 1745 | 648 | GCA CGA GTA ACA ACC TCA CGT ACT TGG ACA ACT |
| | | | TTG AAG ATC ATT TTC TCA |
| EGFRmu95 F2 | 1748 | 649 | AAG GCA CGA GTA ACA AGC TCT ATG AGT TGG GCA CTT |
| | | | TTG AAG ATC |
| EGFRmu96_F2 | 1526 | 650 | CAG ATC ATC AGA GGA AAT ATG TAC CAC GAT AAT |
| | | | ATG TAT GCC TTA GCA GTC |

[1060] Confirmed HIFD100 mutants in pDONR221 were subcloned into pcDNA3.2-DEST expression vector by LR reaction.

### B. Protein Expression and Secretion

[1061] The HIFD100-mutants in a pcDNA3.2-DEST expression vector were expressed in 293T cells using Lipofectamine™ 2000-mediated transient gene expression (Invitrogen) in accord with the manufacturer's instruction. Conditioned media was collected 48 hours after transfection. A volume of 15 ul of the conditioned media was analyzed by western blotting. The western blots were probed with anti-Fc antibody to check the protein expression and secretion. DuoSet Human EGFR ELISA Kit (R&D Systems) was used to determine the recombinant HIFD100-mutants in the conditioned media. ELISA plates were coated with 0.4 ug/ml anti-EGFR antibody at room temperature for overnight. Coated plates were washed 3 times in PBS+0.05% Tween®-20, blocked with PBS/1% BSA at room temperature for 2 hours, and washed 3 times again in PBS+0.05% Tween®-20. The conditioned media was initially diluted at 1:1000, and then further diluted at a ratio of 1:2. The diluted conditioned media (CM) was applied to the plates for ELISA detection following the manufacturer's instructions.

### C. Ligand Binding Screening

[1062] EU-labeled EGF binding: Plates coated with 5 μg/ml of anti-Fc antibody were incubated overnight at room temperature. After coating, plates were washed 3 times in PBS/0.05% Tween 20, and blocked with PBS/1% BSA at room temperature for 2 hours. After blocking, plates were washed 3 times with PBS/0.05% Tween 20. Recombinant proteins in conditioned media (20 ng) were diluted with 1×DELFIA® binding buffer, and added to the plates (100 μl/well) and plates were incubated at room temperature for 2 hours. This was followed by 3 washes with 120 ul/well of ice cold DELFIA® wash buffer. Subsequently, EU-EGF (0.5 nM) in DELFIA® binding buffer was added to each well (100 μl/well) and plates were incubated at room temperature for 2 hours (hrs). Plates were washed 3 times with ice-cold DELFIA® wash buffer (120 μl/well).

[1063] DELFIA® Enhancement Solution (110 μl/well) was added to each well, and plates were further incubated at room temperature for 20 minutes. After the incubation, the plates were read by an EnVision® plate reader (PerkinElmer) to detect the time-resolved fluorescence.

### D. TGF-beta and HB-EGF Binding

[1064] Each of TGF-beta and HB-EGF ELISA Kit (R&D System) was modified for the ligand binding assays. Plates were coated with 1 μg/ml anti-Fc antibody (Sigma), incubated at room temperature (RT) overnight, and blocked with PBS/1% BSA at RT for 2 hrs. Blocked plates were incubated with 20 ng of HFD100-mutants protein at RT for 2 hrs. Plates were washed and further incubated with 5-50 nM TGFβ or 5 nM HB-EGF, respectively, in 100 μl/well of binding buffer ((PBS/1% BSA) at RT for 2 hrs. Plates were washed, and further incubated at RT for 2 hrs with 300 ng/ml of biotinylated goat anti-human TGFβ or biotinylated goat anti-human HB-EGF antibody. Streptavidin-HRP (1:200 dilution) was subsequently added to the plates and a substrate solution was applied 20 min later for color development. Plates were read by a microplate reader to determine the values at OD 650 nm.

### E. Results

[1065] Detailed ligand binding studies revealed that the HFD120 bound the HER1 ligands with higher affinity than the wild type (HFD100). Compared with the wild type (HFD100), the HFD120 mutant gave 2-fold higher affinity for EGF, 7-fold improved affinity for HB-EGF, and greater than 30-fold improved affinity for TGF-alpha.

TABLE 30
Binding Affinity
Binding Affinity (KD = nM)

| Growth Factor | HFD100 | T39S | Fold Improvement |
|---|---|---|---|
| EGF | 1.2 | 0.6 | 2 |
| HB-EGF | 3.7 | 0.5 | 7 |
| TGF-β | 25.7 | 0.8 | >30 |

[1066] One mutant called T43K/S193N/E330D/G588S, which included the T43K mutation, also had random PCR introduced mutations. This quadruple mutant had substantially increased HER1 ligand binding activities. This mutant was systematically changed to give rise to two other HER1 mutants called S193N/E330D/G588S and E330D/G588S; both bound HER1 ligands EGF, HB-EGF and TGF-alpha to substantially increased levels compared with the wild type (HFD100); the S193N/E330D/G588S gave higher secretion level of protein than E330D/G588S.

### Example 12

Engineering for Higher Ligand Binding Affinity and Capacity panHER Ligand Traps: Hermodulins with Increased Ligand Binding Capacity

[1067] A heterodimeric HER1/Fc:HER3/Fc construct called RB220h was made with the T39S mutation in the HER1 arm. This T39S mutation is same as in HFD120. HFD120 was expressed and purified as in HFD100 in Examples 2 and 3. The hermodulins also were expressed as mixtures comprising homodimers and heterodimers, designated RB620, containing HFD120, HFD300, and RB220h. See Table 31. RB620 was expressed as described in Example 2 and purified as described for RB600 in Example 3.

TABLE 31A
Hermodulin Compositions

| Molecule Name | Elements |
|---|---|
| HFD100 | Her1/Fc homodimer |
| HFD120 | Her1/Fc homodimer with mutation in HER1 |
| | T39S |
| HFD300 (also called | Her3/Fc homodimer |
| HFD300h) | |
| RB200h | Purified Her1/Fc-Her3/Fc heterodimer |
| RB220 | RB200h with enhanced Her1 component |
| | (Her1 with T39S mutation) |
| RB600 (RB-mix) | Her1/Fc homodimer |
| | Her3/Fc homodimer |
| | Her1-Her3 heterodimer |
| RB620 | RB600 with enhanced Her1 component |
| | (Her1 with T39S mutation) |
| RB630 | RB600 with enhanced Her1 component and |
| | enhanced Her3 component |

[1068] The HER1 or HER3 ligand binding activities (capacity) of the mutants were compared with the wild type constructs. Comparing either the homodimers HFD100 versus HFD120 (mutant construct) or RB200h versus RB220h (mutant construct), the mutants, which contain the T39S mutation in HER1, have approximately 2.5-fold EGF binding capacity compared to their wildtype counterpart (Tables 32, 33, 36, 37). Also, the data show that the mix, either as RB600 or as RB620 have better, i.e., 3- to 10-fold higher HER1 ligand EGF binding capacity (see Tables 33, 36 and 37).

[1069] With respect to HER3 ligand (NRG131) binding capacities of wild type and mutant hermodulins, the difference was less pronounced than that observed for EGF binding. The heterodimer RB200h has approximately 1.6-fold higher NRG1R 1 binding capacity than the mix RB600. The NRG1R1 binding capacities of the mutant heterodimer (RB220h) or the mutant mix RB620 was approximately the same (See Tables 36 and 37). When NRG11 binding activities of heterodimers of either the wild type RB200h or the mutant (RB220h) was compared with the HER3 homodimer (HFD300), the HER3 homodimer HFD300 had 30% of the binding activity of the heterodimers (See Tables 34 and 35).

TABLE 32
Relative EGF Binding Activities

| Protein | Relative Binding to EGF | HFD % |
|---|---|---|
| HFD100-63 | 1 | >99% |
| HFD120-1 | 1.8 | >99% |
| RB200H-X.C | 1 | <0.5% |
| RB220h-1 | 2.47 | <0.5% |

TABLE 33
Relative EGF Binding Activities

| | Relative Binding to | | |
|---|---|---|---|
| Protein | EGF | HFD1xx % | RB2xxh % |
| RB600-1 | 1 | 64% | 27% |
| RB200h-X.C | 0.11 | <0.5% | |
| RB602-1 | 1 | 37% | 46% |
| RB220h-1 | 0.29 | <0.5% | |

TABLE 34
Relative NRG1β1 Binding Activities

| | Relative Binding to | | |
|---|---|---|---|
| Protein | NRG1β1 | HFD2xx % | HFD300% |
| RB600-1 | 1 | 27% | 9% |
| RB200h-X.C | 1.57 | 95% | 5% |
| RB602-1 | 1.68 | 46% | 17% |
| RB220h-1 | 1.76 | >98% | <2% |

TABLE 35
Relative NRG1β1 Binding Activities

| | Relative Binding to | | |
|---|---|---|---|
| Protein | NRG1β1 | purity % | RB2xxh % |
| HFD100-63 | 0.016 | >98% | |
| HFD120-1 | 0.032 | >98% | |
| RB300-1 | 0.636 | 75% | 25% |

TABLE 36
Ligand Binding Specific Activities: RB200h vs. RB600

| | fmol | | fmol | | |
|---|---|---|---|---|---|
| | EGF/fmol | | NRG/fmol | | EGF:NRG |
| | RB200 | SD | RB200 | SD | Ratio |
| RB200h- | 0.153 | 0.008 | 0.302 | 0.013 | 0.508 |
| 65/67/70/72 | | | | | |
| RB200h-1 | 0.051 | 0.003 | 0.407 | 0.025 | 0.125 |
| RB620-1 | 0.174 | 0.008 | 0.387 | 0.031 | 0.449 |
| RB200h-XC | 0.031 | 0.001 | 0.363 | 0.006 | 0.086 |
| RB600-1 | 0.283 | 0.024 | 0.231 | 0.009 | 1.223 |

TABLE 37
Ligand Binding Specific Activities: RB200h vs. RB600

| Protein | Fmol EGF/mg RB | Fmol NRG/mg RB |
|---|---|---|
| RB200h | 0.16 × 10⁶ | 1.91 × 10⁶ |
| RB600 | 1.50 × 10⁶ | 1.22 × 10⁶ |
| RB220h | 0.27 × 10⁶ | 2.14 × 10⁶ |
| RB620 | 0.91 × 10⁶ | 2.04 × 10⁶ |

### Example 13

Nomenclature and Preparation of Component Chain Variants with Increased Half-Life, Production of Cells Encoding the Chain Variants, and Production of Mixtures of Heterodimers and Homodimers and Other Higher Order Structures Comprising the Chains

### A. Nomenclature

TABLE 31B
Hermodulin Compositions - Oligo Trap (5305) = mixture of HER1 HER3 homodimers
with heterodimers; Sequences of exemplary constituent chains set forth below

| Molecule Name | Elements |
|---|---|
| HFD100 | Her1 ECD/Fc homodimer |
| RBLX-100 | |
| oHER1:Fc | |
| EN-2140 (T15S/G564S in HER1 chain) | |
| HFD120 | Her1 ECD/Fc homodimer with |
| | HER1 T39S (T15S) |
| HFD300 (also called HFD300h) | Her3 ECD/Fc homodimer |
| RBLX-300 | |
| oHER3:Fc | |
| EN-2320 (Y246A in HER3) | |
| RB200h | Purified Her1 ECD /Fc-Her3 |
| RBLX-200 | ECD/Fc heterodimer |
| oEGFR-Fc:oHER3-Fc | |
| EN-2242 (T15S/G564S in HER1; Y246A in HER3) | |
| RB220 | RB200h with HER1 ECD T39S |
| | (T15S) |
| RB600 (RB-mix)-Homo Hetero mixture | Her1 ECD/Fc homodimer |
| Oligobodies/Oligo Trap mixture | Her3 ECD/Fc homodimer |
| EN-2642/Neumodulin | Her1-Her3 ECDs heterodimer |
| RB620 | RB600 with enhanced Her1 (Her1 |
| | with T39S) |
| RB630 | RB600 with enhanced Her1 and |
| | enhanced Her3 |
| EN2642 Heterodimer/homodimer mixtures (can include higher | Chain 1 HER1 ECD/Fc (SEQ ID |
| order structures) ECDs are affinity optimized | NO: 653) |
| EN2642 (also called 7933-001) HER/Fc fusion molecules (Pan- | Chain 2 HER3 ECD/Fc SEQ ID |
| HER) have mutations in Her1 and 3, not Fc (SEQ ID Nos. 672 and | NO: 655 |
| 673 set forth full-length HER1 and HER3, respectively including | |
| the mutations | |
| EN-2642 variants - affinity optimized T15S/G564S in HER1, | Her1ECD/Fc-Her3ECD/Fc |
| Y246 in HER3, and Fc modifications to increase half-life: | heterodimer/homodimer mixtures |
| 1) EN2642-LS (also called 7933-005) M428L/N434S in Fc | with Fc mutations for half-life |
| 2) EN2642-YTE (7933-006); M252Y/S254T/T256E in Fc | extension |
| 3) EN2642-YTE + LS (7933-007); M252Y/S254T/T256E/M428L/N434S in Fc | EN2642-LS, EN2642-YTE, |
| 4) EN2642-with full-length (FL) hinge (7933-008) | EN2642-YTE + LS also have |
| | truncated Fc Hinge DKTH |
| | FL hinge: EPKSCDKTHT |
| EN2140- HER 1 homodimer with the T15S/G564S | HER1/Fc chain |
| EN2242 is HER1/ER3 heterodimer | HER1 ECD/Fc with T15S/G564S |
| | HER3 ECD/Fc with Y246A |
| EN 2320 HER3 ECD/Fc homodimer | HER ECD with Y246A |
| | homodimer |

* residue numbering based on construct without the signal sequence; with the signal sequence (i.e., T15S = T34S)

### Example 14

### Half-Life Engineering and Protein Production of EN2642 and the Variants

### Background

[1070] As described herein, antibody engineering has identified mutations in the IgG Fe that can extend in-vivo half-life. These mutations include the YTE (MV252Y, S254T, T256E) and the LS (M428L, N434S) on IgG1 Fc (for a review, see Saunders K.O., Frontiers in Immunology. 2019). As described in the Examples, above, these mutations have been incorporated into constructs to produce the following variants (Table 38 below). The EN2642 variant with a full-length hinge (EN2642-Hinge) which is 5-amino-acids longer N-terminally than the parental and other variants (Table 38 below). The sequences and structures of the constructs comprising the chains in the variants are detailed in the Example above.

TABLE 38
Nomenclature and production volume

| | | | Production |
|---|---|---|---|
| Nomenclature | code | Mutation in Fc | vol. (L) |
| EN2642 | 7933-001 | Parent | 6 |
| EN-2642-FcLS | 7933-005 | LS | 4 |
| EN-2642-FcYTE | 7933-006 | YTE | 4 |
| EN-2642- FcLS + YTE | 7933-007 | LS + YTE | 4 |
| EN-2642-Hinge | 7933-008 | F.L. Hinge | 7 |

### Methods and Results

[1071] EN2642 and the variants were produced in CHO cells by co-transfection of the two plasmids encoding the EGFR/Fc and HER3/Fc respectively at a ratio of 1:1. The recombinant proteins expressed were one-step purified by protein A (MabSelect SuRe), and result in one heterodimer and two homodimers. Stability of the purified proteins was tested, and no noticeable difference was found by SEC-HPLC after 3 freeze-thaw cycles. All purified proteins have endotoxin levels <0.1 (LAL) EU/mg of proteins. The purified proteins are stored at −80° C.

TABLE 39
Yield of purified proteins

| Monomer | | | | | % HMV aggregation vs Monomer | | |
|---|---|---|---|---|---|---|---|
| | | Total yield | | | Amount | % | % |
| Name | code | (mg) | Purity | Mg/vial | (mg) | HMW* | monomer* |
| EN2642 | 7933- | 466.9 | >98% | 10 | 518.26 | 29.01 | 70.99 |
| | 001 | | | | | | |
| EN-2642-FcLS | 7933- | 328.9 | >98% | 10 | 434.19 | 42.81 | 57.19 |
| | 005 | | | | | | |
| EN-2642- | 7933- | 341.1 | >98% | 10 | 599.97 | 36.67 | 63.33 |
| FcYTE | 006 | | | | | | |
| EN-2642- | 7933- | 343.8 | >98% | 10 | 422.90 | 32.09 | 67.91 |
| FcLS + YTE | 007 | | | | | | |
| EN-2642- | 7933- | 326.7 | >98% | 10 | 731.87 | 54.21 | 45.79 |
| Hinge | 008 | | | | | | |

*% high molecular weight by SEC-HPLC
**% monomer by SEC-HPLC

### Example 15

### Preparation of the Constructs Containing Fc Variants

A. Sequences of EN2642 constituent chains and chains with Fc variants

[1072] A series of variants designated the EN2642 family and the constituent chains were prepared.

### 1. Sequence Information

[1073] a. SEQ ID NO:651 sets forth the exemplary signal sequence (1-19) used for expression of each chain (MGWSCIILFLVATATGVHS; it is understood that other signal sequences appropriate for expression in selected cells, can be used.
[1074] b. SEQ ID NO:448 Trastuzumab HINGE
[1075] EPKSCDKTHTCPPCP (residues 6-15 included in constructs below, and full-length hinge in chains of SEQ ID NOs: 668-671)
[1076] c. Sequences of EN2642 wild type and variants components and its 5 variants engineered for in vivo half-life extension SEQ ID NOs: 652-671
   [1077] 1)*Notes:
      [1078] i. Signal peptides are underlined.
      [1079] ii. Mutations in the Fc are in bold and underlined (numbered with respect to position in the Fc).
      [1080] iii. DKTH, in bold, is the N-terminal of the Fc
      [1081] iv. Numbering of the mutations in the Fc portions of the chains is with respect EU numbering (see Tables 3-4).
   [1082] 2) Variants have mutations in ECDs to increase affinity, and in some, as noted, of the Fcs to increase half-life of the resulting constructs.
   [1083] 3) Also, included are variants, including allelic and species variants of the components of the chains. Included are component chains that have at least 95%, 96%, 97%, 98%, 99%, and more sequence identity with any of the sequences of the chains and/or constructs, as long as the properties, such as the increased affinity and/or increase half-life are retained or increased.
      2. Sequences of the chains and variants with modified Fc portions (SEQ ID NOs: 656-671).

[1084] The chains include mutations designed to improve the half-life (SEQ ID NOs:656-671, the chains include ECD affinity optimized HER1 and HER 3 variants linked to modified Fc regions (Fc N-terminus at DKTH, except for SEQ ID Nos.668-671, which includes the full-length hinge EPKSCDKTHT and no modifications of the Fc); Fc residues numbered by EU numbering (see, Tables 3-4). Included are chains that have at least 95%, 96%, 97%, 98%, 99%, and more sequence identity with SEQ ID NOs:652-671 (excluding the signal sequences, wherein included), and that include the replacements that increase affinity of the ECD and/or the half-life of the resulting constructs, including the heterodimers and homodimers by virtue of Fc modifications. Also included are chains and constructs with different or additional modifications that increase affinity for targeted ligands and/or increase half-life. It is understood that the following chains are for exemplification, and that one of skill in the art can, in light of this disclosure prepare other chains for producing the mixtures that comprise the heterodimer and homodimers. Also provided are the component chains and their use with other chains to produce different heterodimers and/or homodimers. Purified heterodimers among the following chains and variants thereof are contemplated. Wild-type refers to the Fc portion; the ECD portion includes replacements (such as T35S and G583S in HER1, where the signal sequence is included, and T15S and G564S, where the signal sequence is not included).

>EN2642 Chain 1 with wildtype Fc (DKTH of the Fc in bold)
SEQ ID NO: 652
MGWSCIILFLVATATGVHSLEEKKVCQGTSNKLSQLGTFEDHELSLQRMENNCEVVLGNLEITYVQRNY
DLSFLKTIQEVAGYVLIALNTVERIPLENLQIIRGNMYYENSYALAVLSNYDANKTGLKELPMRNLQEI
LHGAVRFSNNPALCNVESIQWRDIVSSDFLSNMSMDFQNHLGSCQKCDPSCPNGSCWGAGEENCQKLTK
IICAQQCSGRCRGKSPSDCCHNQCAAGCTGPRESDCLVCRKERDEATCKDTCPPLMLYNPTTYQMDVNP
EGKYSFGATCVKKCPRNYVVTDHGSCVRACGADSYEMEEDGVRKCKKCEGPCRKVCNGIGIGEFKDSLS
INATNIKHFKNCTSISGDLHILPVAFRGDSFTHTPPLDPQELDILKTVKEITGELLIQAWPENRTDLHA
FENLEIIRGRTKQHGQFSLAVVSLNITSLGLRSLKEISDGDVIISGNKNLCYANTINWKKLFGTSGQKT
KIISNRGENSCKATGQVCHALCSPEGCWGPEPRDCVSCRNVSRGRECVDKCKLLEGEPREFVENSECIQ
CHPECLPQAMNITCTGRGPDNCIQCAHYIDSPHCVKTCPAGVMGENNTLVWKYADAGHVCHLCHPNCTY
GCTGPGLEGCPTNGPKIPSDKTHTCPPCPAPELLGGPSVFLFPPKPKDTLMISRTPEVTCVVVDVSHED
PEVKENWYVDGVEVHNAKTKPREEQYNSTYRVVSVLTVLHQDWLNGKEYKCKVSNKALPAPIEKTISKA
KGQPREPQVYTLPPSRDELTKNQVSLTCLVKGFYPSDIAVEWESNGQPENNYKTTPPVLDSDGSFFLYS
KLTVDKSRWQQGNVFSCSVMHEALHNHYTQKSLSLSPGK
>EN2642 Wildtype Chain 1 without the signal sequence
SEQ ID NO: 653
LEEKKVCQGTSNKLSQLGTFEDHFLSLQRMFNNCEVVLGNLEITYVQRNYDLSFLKTIQEVAGYVLIAL
NTVERIPLENLQIIRGNMYYENSYALAVLSNYDANKTGLKELPMRNLQEILHGAVRESNNPALCNVESI
QWRDIVSSDFLSNMSMDFQNHLGSCQKCDPSCPNGSCWGAGEENCQKLTKIICAQQCSGRCRGKSPSDC
CHNQCAAGCTGPRESDCLVCRKFRDEATCKDTCPPLMLYNPTTYQMDVNPEGKYSFGATCVKKCPRNYV
VTDHGSCVRACGADSYEMEEDGVRKCKKCEGPCRKVCNGIGIGEFKDSLSINATNIKHEKNCTSISGDL
HILPVAFRGDSFTHTPPLDPQELDILKTVKEITGELLIQAWPENRTDLHAFENLEIIRGRTKQHGQFSL
AVVSLNITSLGLRSLKEISDGDVIISGNKNLCYANTINWKKLFGTSGQKTKIISNRGENSCKATGQVCH
ALCSPEGCWGPEPRDCVSCRNVSRGRECVDKCKLLEGEPREFVENSECIQCHPECLPQAMNITCTGRGP
DNCIQCAHYIDSPHCVKTCPAGVMGENNTLVWKYADAGHVCHLCHPNCTYGCTGPGLEGCPTNGPKIPS
DKTHTCPPCPAPELLGGPSVFLFPPKPKDTLMISRTPEVTCVVVDVSHEDPEVKENWYVDGVEVHNAKT
KPREEQYNSTYRVVSVLTVLHQDWLNGKEYKCKVSNKALPAPIEKTISKAKGQPREPQVYTLPPSRDEL
TKNQVSLTCLVKGFYPSDIAVEWESNGQPENNYKTTPPVLDSDGSFFLYSKLTVDKSRWQQGNVFSCSV
MHEALHNHYTQKSLSLSPGK
>EN2642 Wildtype Chain 2
SEQ ID NO: 654
MGWSCIILFLVATATGVHSSEVGNSQAVCPGTLNGLSVTGDAENQYQTLYKLYERCEVVMGNLEIVLTG
HNADLSFLQWIREVTGYVLVAMNEFSTLPLPNLRVVRGTQVYDGKFAIFVMLNYNTNSSHALRQLRLTQ
LTEILSGGVYIEKNDKLCHMDTIDWRDIVRDRDAEIVVKDNGRSCPPCHEVCKGRCWGPGSEDCQTLTK
TICAPQCNGHCFGPNPNQCCHDECAGGCSGPQDTDCFACRHENDSGACVPRCPQPLVANKLTFQLEPNP
HTKYQYGGVCVASCPHNFVVDQTSCVRACPPDKMEVDKNGLKMCEPCGGLCPKACEGTGSGSRFQTVDS
SNIDGFVNCTKILGNLDFLITGLNGDPWHKIPALDPEKLNVERTVREITGYLNIQSWPPHMHNESVESN
LTTIGGRSLYNRGFSLLIMKNLNVTSLGERSLKEISAGRIYISANRQLCYHHSLNWTKVLRGPTEERLD
IKHNRPRRDCVAEGKVCDPLCSSGGCWGPGPGQCLSCRNYSRGGVCVTHCNELNGEPREFAHEAECFSC
HPECQPMEGTATCNGSGSDTCAQCAHERDGPHCVSSCPHGVLGAKGPIYKYPDVQNECRPCHENCTQGC
KGPELQDCLGQTLVLIGKTHLTDKTHTCPPCPAPELLGGPSVFLFPPKPKDTLMISRTPEVTCVVVDVS
HEDPEVKFNWYVDGVEVHNAKTKPREEQYNSTYRVVSVLTVLHQDWLNGKEYKCKVSNKALPAPIEKTI
SKAKGQPREPQVYTLPPSRDELTKNQVSLTCLVKGFYPSDIAVEWESNGQPENNYKTTPPVLDSDGSFF
LYSKLTVDKSRWQQGNVFSCSVMHEALHNHYTQKSLSLSPGK
>EN2642 Wildtype Chain 2 without the signal sequence
SEQ ID NO: 655
SEVGNSQAVCPGTLNGLSVTGDAENQYQTLYKLYERCEVVMGNLEIVLTGHNADLSFLQWIREVTGYVL
VAMNEFSTLPLPNLRVVRGTQVYDGKFAIFVMLNYNTNSSHALRQLRLTQLTEILSGGVYIEKNDKLCH
MDTIDWRDIVRDRDAEIVVKDNGRSCPPCHEVCKGRCWGPGSEDCQTLTKTICAPQCNGHCFGPNPNQC
CHDECAGGCSGPQDTDCFACRHENDSGACVPRCPQPLVANKLTFQLEPNPHTKYQYGGVCVASCPHNFV
VDQTSCVRACPPDKMEVDKNGLKMCEPCGGLCPKACEGTGSGSRFQTVDSSNIDGFVNCTKILGNLDEL
ITGLNGDPWHKIPALDPEKLNVERTVREITGYLNIQSWPPHMHNESVESNLTTIGGRSLYNRGESLLIM
KNLNVTSLGFRSLKEISAGRIYISANRQLCYHHSLNWTKVLRGPTEERLDIKHNRPRRDCVAEGKVCDP
LCSSGGCWGPGPGQCLSCRNYSRGGVCVTHCNFLNGEPREFAHEAECFSCHPECQPMEGTATCNGSGSD
TCAQCAHFRDGPHCVSSCPHGVLGAKGPIYKYPDVQNECRPCHENCTQGCKGPELQDCLGQTLVLIGKT
HLTDKTHTCPPCPAPELLGGPSVFLFPPKPKDTLMISRTPEVTCVVVDVSHEDPEVKENWYVDGVEVHN
AKTKPREEQYNSTYRVVSVLTVLHQDWLNGKEYKCKVSNKALPAPIEKTISKAKGQPREPQVYTLPPSR
DELTKNQVSLTCLVKGFYPSDIAVEWESNGQPENNYKTTPPVLDSDGSFFLYSKLTVDKSRWQQGNVES
CSVMHEALHNHYTQKSLSLSPGK
>EN2642-LS (M428L, N434S) Chain 1
SEQ ID NO: 656
MGWSCIILFLVATATGVHSLEEKKVCQGTSNKLSQLGTFEDHFLSLQRMENNCEVVLGNLEITYVQRNY
DLSFLKTIQEVAGYVLIALNTVERIPLENLQIIRGNMYYENSYALAVLSNYDANKTGLKELPMRNLQEI
LHGAVRFSNNPALCNVESIQWRDIVSSDELSNMSMDFQNHLGSCQKCDPSCPNGSCWGAGEENCQKLTK
IICAQQCSGRCRGKSPSDCCHNQCAAGCTGPRESDCLVCRKERDEATCKDTCPPLMLYNPTTYQMDVNP
EGKYSFGATCVKKCPRNYVVTDHGSCVRACGADSYEMEEDGVRKCKKCEGPCRKVCNGIGIGEFKDSLS
INATNIKHFKNCTSISGDLHILPVAFRGDSFTHTPPLDPQELDILKTVKEITGELLIQAWPENRTDLHA
FENLEIIRGRTKQHGQFSLAVVSLNITSLGLRSLKEISDGDVIISGNKNLCYANTINWKKLFGTSGQKT
KIISNRGENSCKATGQVCHALCSPEGCWGPEPRDCVSCRNVSRGRECVDKCKLLEGEPREFVENSECIQ
CHPECLPQAMNITCTGRGPDNCIQCAHYIDSPHCVKTCPAGVMGENNTLVWKYADAGHVCHLCHPNCTY
GCTGPGLEGCPTNGPKIPSDKTHTCPPCPAPELLGGPSVFLFPPKPKDTLMISRTPEVTCVVVDVSHED
PEVKFNWYVDGVEVHNAKTKPREEQYNSTYRVVSVLTVLHQDWLNGKEYKCKVSNKALPAPIEKTISKA
KGQPREPQVYTLPPSREEMTKNQVSLTCLVKGFYPSDIAVEWESNGQPENNYKTTPPVLDSDGSFFLYS
KLTVDKSRWQQGNVFSCSVLHEALHSHYTQKSLSLSPG
>EN2642-LS (M428L, N434S) Chain 1 without the signal sequence
SEQ ID NO: 657
LEEKKVCQGTSNKLSQLGTFEDHELSLQRMENNCEVVLGNLEITYVQRNYDLSFLKTIQEVAGYVLIAL
NTVERIPLENLQIIRGNMYYENSYALAVLSNYDANKTGLKELPMRNLQEILHGAVRESNNPALCNVESI
QWRDIVSSDFLSNMSMDFQNHLGSCQKCDPSCPNGSCWGAGEENCQKLTKIICAQQCSGRCRGKSPSDC
CHNQCAAGCTGPRESDCLVCRKERDEATCKDTCPPLMLYNPTTYQMDVNPEGKYSFGATCVKKCPRNYV
VTDHGSCVRACGADSYEMEEDGVRKCKKCEGPCRKVCNGIGIGEFKDSLSINATNIKHFKNCTSISGDL
HILPVAFRGDSFTHTPPLDPQELDILKTVKEITGELLIQAWPENRTDLHAFENLEIIRGRTKQHGQFSL
AVVSLNITSLGLRSLKEISDGDVIISGNKNLCYANTINWKKLFGTSGQKTKIISNRGENSCKATGQVCH
ALCSPEGCWGPEPRDCVSCRNVSRGRECVDKCKLLEGEPREFVENSECIQCHPECLPQAMNITCTGRGP
DNCIQCAHYIDSPHCVKTCPAGVMGENNTLVWKYADAGHVCHLCHPNCTYGCTGPGLEGCPTNGPKIPS
DKTHTCPPCPAPELLGGPSVFLFPPKPKDTLMISRTPEVTCVVVDVSHEDPEVKENWYVDGVEVHNAKT
KPREEQYNSTYRVVSVLTVLHQDWLNGKEYKCKVSNKALPAPIEKTISKAKGQPREPQVYTLPPSREEM
TKNQVSLTCLVKGFYPSDIAVEWESNGQPENNYKTTPPVLDSDGSFFLYSKLTVDKSRWQQGNVFSCSV
LHEALHSHYTQKSLSLSPG
>EN2642-LS (M428L, N434S) Chain 2
SEQ ID NO: 658
MGWSCIILFLVATATGVHSSEVGNSQAVCPGTLNGLSVTGDAENQYQTLYKLYERCEVVMGNLEIVLTG
HNADLSFLQWIREVTGYVLVAMNEFSTLPLPNLRVVRGTQVYDGKFAIFVMLNYNTNSSHALRQLRLTQ
LTEILSGGVYIEKNDKLCHMDTIDWRDIVRDRDAEIVVKDNGRSCPPCHEVCKGRCWGPGSEDCQTLTK
TICAPQCNGHCFGPNPNQCCHDECAGGCSGPQDTDCFACRHENDSGACVPRCPQPLVANKLTFQLEPNP
HTKYQYGGVCVASCPHNFVVDQTSCVRACPPDKMEVDKNGLKMCEPCGGLCPKACEGTGSGSRFQTVDS
SNIDGFVNCTKILGNLDFLITGLNGDPWHKIPALDPEKLNVERTVREITGYLNIQSWPPHMHNFSVESN
LTTIGGRSLYNRGESLLIMKNLNVTSLGERSLKEISAGRIYISANRQLCYHHSLNWTKVLRGPTEERLD
IKHNRPRRDCVAEGKVCDPLCSSGGCWGPGPGQCLSCRNYSRGGVCVTHCNFLNGEPREFAHEAECFSC
HPECQPMEGTATCNGSGSDTCAQCAHFRDGPHCVSSCPHGVLGAKGPIYKYPDVQNECRPCHENCTQGC
KGPELQDCLGQTLVLIGKTHLTDKTHTCPPCPAPELLGGPSVFLFPPKPKDTLMISRTPEVTCVVVDVS
HEDPEVKENWYVDGVEVHNAKTKPREEQYNSTYRVVSVLTVLHQDWLNGKEYKCKVSNKALPAPIEKTI
SKAKGQPREPQVYTLPPSREEMTKNQVSLTCLVKGFYPSDIAVEWESNGQPENNYKTTPPVLDSDGSFF
LYSKLTVDKSRWQQGNVFSCSVLHEALHSHYTQKSLSLSPG
>EN2642-LS (M428L, N434S) Chain 2 without the signal sequence
SEQ ID NO: 659
SEVGNSQAVCPGTLNGLSVTGDAENQYQTLYKLYERCEVVMGNLEIVLTGHNADLSFLQWIREVTGYVL
VAMNEFSTLPLPNLRVVRGTQVYDGKFAIFVMLNYNTNSSHALRQLRLTQLTEILSGGVYIEKNDKLCH
MDTIDWRDIVRDRDAEIVVKDNGRSCPPCHEVCKGRCWGPGSEDCQTLTKTICAPQCNGHCFGPNPNQC
CHDECAGGCSGPQDTDCFACRHENDSGACVPRCPQPLVANKLTFQLEPNPHTKYQYGGVCVASCPHNEV
VDQTSCVRACPPDKMEVDKNGLKMCEPCGGLCPKACEGTGSGSRFQTVDSSNIDGFVNCTKILGNLDEL
ITGLNGDPWHKIPALDPEKLNVERTVREITGYLNIQSWPPHMHNESVESNLTTIGGRSLYNRGESLLIM
KNLNVTSLGFRSLKEISAGRIYISANRQLCYHHSLNWTKVLRGPTEERLDIKHNRPRRDCVAEGKVCDP
LCSSGGCWGPGPGQCLSCRNYSRGGVCVTHCNFLNGEPREFAHEAECFSCHPECQPMEGTATCNGSGSD
TCAQCAHFRDGPHCVSSCPHGVLGAKGPIYKYPDVQNECRPCHENCTQGCKGPELQDCLGQTLVLIGKT
HLTDKTHTCPPCPAPELLGGPSVFLFPPKPKDTLMISRTPEVTCVVVDVSHEDPEVKENWYVDGVEVHN
AKTKPREEQYNSTYRVVSVLTVLHQDWLNGKEYKCKVSNKALPAPIEKTISKAKGQPREPQVYTLPPSR
EEMTKNQVSLTCLVKGFYPSDIAVEWESNGQPENNYKTTPPVLDSDGSFFLYSKLTVDKSRWQQGNVES
CSVLHEALHSHYTQKSLSLSPG
>EN2642-YTE (M252Y, S254T, T256E) ) Chain 1
SEQ ID NO: 660
MGWSCIILFLVATATGVHSLEEKKVCQGTSNKLSQLGTFEDHELSLQRMENNCEVVLGNLEITYVQRNY
DLSFLKTIQEVAGYVLIALNTVERIPLENLQIIRGNMYYENSYALAVLSNYDANKTGLKELPMRNLQEI
LHGAVRFSNNPALCNVESIQWRDIVSSDELSNMSMDFQNHLGSCQKCDPSCPNGSCWGAGEENCQKLTK
IICAQQCSGRCRGKSPSDCCHNQCAAGCTGPRESDCLVCRKFRDEATCKDTCPPLMLYNPTTYQMDVNP
EGKYSFGATCVKKCPRNYVVTDHGSCVRACGADSYEMEEDGVRKCKKCEGPCRKVCNGIGIGEFKDSLS
INATNIKHFKNCTSISGDLHILPVAFRGDSFTHTPPLDPQELDILKTVKEITGELLIQAWPENRTDLHA
FENLEIIRGRTKQHGQFSLAVVSLNITSLGLRSLKEISDGDVIISGNKNLCYANTINWKKLFGTSGQKT
KIISNRGENSCKATGQVCHALCSPEGCWGPEPRDCVSCRNVSRGRECVDKCKLLEGEPREFVENSECIQ
CHPECLPQAMNITCTGRGPDNCIQCAHYIDSPHCVKTCPAGVMGENNTLVWKYADAGHVCHLCHPNCTY
GCTGPGLEGCPTNGPKIPSDKTHTCPPCPAPELLGGPSVFLFPPKPKDTLYITREPEVTCVVVDVSHED
PEVKFNWYVDGVEVHNAKTKPREEQYNSTYRVVSVLTVLHQDWLNGKEYKCKVSNKALPAPIEKTISKA
KGQPREPQVYTLPPSRDELTKNQVSLTCLVKGFYPSDIAVEWESNGQPENNYKTTPPVLDSDGSFFLYS
KLTVDKSRWQQGNVFSCSVMHEALHNHYTQKSLSLSPGK
>EN2642-YTE (M252Y, S254T, T256E in the Fc) chain 1 without the signal
sequence
SEQ ID NO: 661
LEEKKVCQGTSNKLSQLGTFEDHELSLQRMENNCEVVLGNLEITYVQRNYDLSFLKTIQEVAGYVLIAL
NTVERIPLENLQIIRGNMYYENSYALAVLSNYDANKTGLKELPMRNLQEILHGAVRESNNPALCNVESI
QWRDIVSSDELSNMSMDFQNHLGSCQKCDPSCPNGSCWGAGEENCQKLTKIICAQQCSGRCRGKSPSDC
CHNQCAAGCTGPRESDCLVCRKFRDEATCKDTCPPLMLYNPTTYQMDVNPEGKYSFGATCVKKCPRNYV
VTDHGSCVRACGADSYEMEEDGVRKCKKCEGPCRKVCNGIGIGEFKDSLSINATNIKHFKNCTSISGDL
HILPVAFRGDSFTHTPPLDPQELDILKTVKEITGELLIQAWPENRTDLHAFENLEIIRGRTKQHGQFSL
AVVSLNITSLGLRSLKEISDGDVIISGNKNLCYANTINWKKLFGTSGQKTKIISNRGENSCKATGQVCH
ALCSPEGCWGPEPRDCVSCRNVSRGRECVDKCKLLEGEPREFVENSECIQCHPECLPQAMNITCTGRGP
DNCIQCAHYIDSPHCVKTCPAGVMGENNTLVWKYADAGHVCHLCHPNCTYGCTGPGLEGCPTNGPKIPS
DKTHTCPPCPAPELLGGPSVFLFPPKPKDTLYITREPEVTCVVVDVSHEDPEVKENWYVDGVEVHNAKT
KPREEQYNSTYRVVSVLTVLHQDWLNGKEYKCKVSNKALPAPIEKTISKAKGQPREPQVYTLPPSRDEL
TKNQVSLTCLVKGFYPSDIAVEWESNGQPENNYKTTPPVLDSDGSFFLYSKLTVDKSRWQQGNVFSCSV
MHEALHNHYTQKSLSLSPGK
>EN2642-YTE (M252Y, S254T, T256E) ) Chain 2
SEQ ID NO: 662
MGWSCIILFLVATATGVHSSEVGNSQAVCPGTLNGLSVTGDAENQYQTLYKLYERCEVVMGNLEIVLTG
HNADLSFLQWIREVTGYVLVAMNEFSTLPLPNLRVVRGTQVYDGKFAIFVMLNYNTNSSHALRQLRLTQ
LTEILSGGVYIEKNDKLCHMDTIDWRDIVRDRDAEIVVKDNGRSCPPCHEVCKGRCWGPGSEDCQTLTK
TICAPQCNGHCFGPNPNQCCHDECAGGCSGPQDTDCFACRHENDSGACVPRCPQPLVANKLTFQLEPNP
HTKYQYGGVCVASCPHNFVVDQTSCVRACPPDKMEVDKNGLKMCEPCGGLCPKACEGTGSGSRFQTVDS
SNIDGFVNCTKILGNLDFLITGLNGDPWHKIPALDPEKLNVFRTVREITGYLNIQSWPPHMHNFSVFSN
LTTIGGRSLYNRGESLLIMKNLNVTSLGERSLKEISAGRIYISANRQLCYHHSLNWTKVLRGPTEERLD
IKHNRPRRDCVAEGKVCDPLCSSGGCWGPGPGQCLSCRNYSRGGVCVTHCNELNGEPREFAHEAECFSC
HPECQPMEGTATCNGSGSDTCAQCAHERDGPHCVSSCPHGVLGAKGPIYKYPDVQNECRPCHENCTQGC
KGPELQDCLGQTLVLIGKTHLTDKTHTCPPCPAPELLGGPSVFLFPPKPKDTLYITREPEVTCVVVDVS
HEDPEVKFNWYVDGVEVHNAKTKPREEQYNSTYRVVSVLTVLHQDWLNGKEYKCKVSNKALPAPIEKTI
SKAKGQPREPQVYTLPPSRDELTKNQVSLTCLVKGFYPSDIAVEWESNGQPENNYKTTPPVLDSDGSFF
LYSKLTVDKSRWQQGNVFSCSVMHEALHNHYTQKSLSLSPGK
>EN2642-YTE (M252Y, S254T, T256E) ) Chain 2 without the signal sequence
SEQ ID NO: 663
SEVGNSQAVCPGTLNGLSVTGDAENQYQTLYKLYERCEVVMGNLEIVLTGHNADLSFLQWIREVTGYVL
VAMNEFSTLPLPNLRVVRGTQVYDGKFAIFVMLNYNTNSSHALRQLRLTQLTEILSGGVYIEKNDKLCH
MDTIDWRDIVRDRDAEIVVKDNGRSCPPCHEVCKGRCWGPGSEDCQTLTKTICAPQCNGHCFGPNPNQC
CHDECAGGCSGPQDTDCFACRHENDSGACVPRCPQPLVANKLTFQLEPNPHTKYQYGGVCVASCPHNEV
VDQTSCVRACPPDKMEVDKNGLKMCEPCGGLCPKACEGTGSGSRFQTVDSSNIDGFVNCTKILGNLDEL
ITGLNGDPWHKIPALDPEKLNVFRTVREITGYLNIQSWPPHMHNFSVFSNLTTIGGRSLYNRGFSLLIM
KNLNVTSLGERSLKEISAGRIYISANRQLCYHHSLNWTKVLRGPTEERLDIKHNRPRRDCVAEGKVCDP
LCSSGGCWGPGPGQCLSCRNYSRGGVCVTHCNFLNGEPREFAHEAECFSCHPECQPMEGTATCNGSGSD
TCAQCAHFRDGPHCVSSCPHGVLGAKGPIYKYPDVQNECRPCHENCTQGCKGPELQDCLGQTLVLIGKT
HLTDKTHTCPPCPAPELLGGPSVFLFPPKPKDTLYITREPEVTCVVVDVSHEDPEVKENWYVDGVEVHN
AKTKPREEQYNSTYRVVSVLTVLHQDWLNGKEYKCKVSNKALPAPIEKTISKAKGQPREPQVYTLPPSR
DELTKNQVSLTCLVKGFYPSDIAVEWESNGQPENNYKTTPPVLDSDGSFFLYSKLTVDKSRWQQGNVES
CSVMHEALHNHYTQKSLSLSPGK
>EN2642-YTE+LS Chain 1
SEQ ID NO: 664
MGWSCIILFLVATATGVHSLEEKKVCQGTSNKLSQLGTFEDHFLSLQRMENNCEVVLGNLEITYVQRNY
DLSFLKTIQEVAGYVLIALNTVERIPLENLQIIRGNMYYENSYALAVLSNYDANKTGLKELPMRNLQEI
LHGAVRFSNNPALCNVESIQWRDIVSSDELSNMSMDFQNHLGSCQKCDPSCPNGSCWGAGEENCQKLTK
IICAQQCSGRCRGKSPSDCCHNQCAAGCTGPRESDCLVCRKERDEATCKDTCPPLMLYNPTTYQMDVNP
EGKYSFGATCVKKCPRNYVVTDHGSCVRACGADSYEMEEDGVRKCKKCEGPCRKVCNGIGIGEFKDSLS
INATNIKHFKNCTSISGDLHILPVAFRGDSFTHTPPLDPQELDILKTVKEITGELLIQAWPENRTDLHA
FENLEIIRGRTKQHGQFSLAVVSLNITSLGLRSLKEISDGDVIISGNKNLCYANTINWKKLFGTSGQKT
KIISNRGENSCKATGQVCHALCSPEGCWGPEPRDCVSCRNVSRGRECVDKCKLLEGEPREFVENSECIQ
CHPECLPQAMNITCTGRGPDNCIQCAHYIDSPHCVKTCPAGVMGENNTLVWKYADAGHVCHLCHPNCTY
GCTGPGLEGCPTNGPKIPSDKTHTCPPCPAPELLGGPSVFLFPPKPKDTLYITREPEVTCVVVDVSHED
PEVKFNWYVDGVEVHNAKTKPREEQYNSTYRVVSVLTVLHQDWLNGKEYKCKVSNKALPAPIEKTISKA
KGQPREPQVYTLPPSREEMTKNQVSLTCLVKGFYPSDIAVEWESNGQPENNYKTTPPVLDSDGSFFLYS
KLTVDKSRWQQGNVFSCSVLHEALHSHYTQKSLSLSPG
>EN2642-YTE+LS Chain 1 without the signal sequence
SEQ ID NO: 665
LEEKKVCQGTSNKLSQLGTFEDHFLSLQRMENNCEVVLGNLEITYVQRNYDLSFLKTIQEVAGYVLIAL
NTVERIPLENLQIIRGNMYYENSYALAVLSNYDANKTGLKELPMRNLQEILHGAVRESNNPALCNVESI
QWRDIVSSDFLSNMSMDFQNHLGSCQKCDPSCPNGSCWGAGEENCQKLTKIICAQQCSGRCRGKSPSDC
CHNQCAAGCTGPRESDCLVCRKERDEATCKDTCPPLMLYNPTTYQMDVNPEGKYSFGATCVKKCPRNYV
VTDHGSCVRACGADSYEMEEDGVRKCKKCEGPCRKVCNGIGIGEFKDSLSINATNIKHFKNCTSISGDL
HILPVAFRGDSFTHTPPLDPQELDILKTVKEITGELLIQAWPENRTDLHAFENLEIIRGRTKQHGQFSL
AVVSLNITSLGLRSLKEISDGDVIISGNKNLCYANTINWKKLFGTSGQKTKIISNRGENSCKATGQVCH
ALCSPEGCWGPEPRDCVSCRNVSRGRECVDKCKLLEGEPREFVENSECIQCHPECLPQAMNITCTGRGP
DNCIQCAHYIDSPHCVKTCPAGVMGENNTLVWKYADAGHVCHLCHPNCTYGCTGPGLEGCPTNGPKIPS
DKTHTCPPCPAPELLGGPSVFLFPPKPKDTLYITREPEVTCVVVDVSHEDPEVKENWYVDGVEVHNAKT
KPREEQYNSTYRVVSVLTVLHQDWLNGKEYKCKVSNKALPAPIEKTISKAKGQPREPQVYTLPPSREEM
TKNQVSLTCLVKGFYPSDIAVEWESNGQPENNYKTTPPVLDSDGSFFLYSKLTVDKSRWQQGNVFSCSV
LHEALHSHYTQKSLSLSPG
>EN2642-YTE+LS Chain 2
SEQ ID NO: 666
MGWSCIILFLVATATGVHSSEVGNSQAVCPGTLNGLSVTGDAENQYQTLYKLYERCEVVMGNLEIVLTG
HNADLSFLQWIREVTGYVLVAMNEFSTLPLPNLRVVRGTQVYDGKFAIFVMLNYNTNSSHALRQLRLTQ
LTEILSGGVYIEKNDKLCHMDTIDWRDIVRDRDAEIVVKDNGRSCPPCHEVCKGRCWGPGSEDCQTLTK
TICAPQCNGHCFGPNPNQCCHDECAGGCSGPQDTDCFACRHENDSGACVPRCPQPLVANKLTFQLEPNP
HTKYQYGGVCVASCPHNFVVDQTSCVRACPPDKMEVDKNGLKMCEPCGGLCPKACEGTGSGSRFQTVDS
SNIDGFVNCTKILGNLDFLITGLNGDPWHKIPALDPEKLNVERTVREITGYLNIQSWPPHMHNESVESN
LTTIGGRSLYNRGFSLLIMKNLNVTSLGERSLKEISAGRIYISANRQLCYHHSLNWTKVLRGPTEERLD
IKHNRPRRDCVAEGKVCDPLCSSGGCWGPGPGQCLSCRNYSRGGVCVTHCNFLNGEPREFAHEAECFSC
HPECQPMEGTATCNGSGSDTCAQCAHFRDGPHCVSSCPHGVLGAKGPIYKYPDVQNECRPCHENCTQGC
KGPELQDCLGQTLVLIGKTHLTDKTHTCPPCPAPELLGGPSVELFPPKPKDTLYITREPEVTCVVVDVS
HEDPEVKFNWYVDGVEVHNAKTKPREEQYNSTYRVVSVLTVLHQDWLNGKEYKCKVSNKALPAPIEKTI
SKAKGQPREPQVYTLPPSREEMTKNQVSLTCLVKGFYPSDIAVEWESNGQPENNYKTTPPVLDSDGSFF
LYSKLTVDKSRWQQGNVFSCSVLHEALHSHYTQKSLSLSPG
>EN2642-YTE+LS Chain 2 without the signal sequence
SEQ ID NO: 667
SEVGNSQAVCPGTLNGLSVTGDAENQYQTLYKLYERCEVVMGNLEIVLTGHNADLSFLQWIREVTGYVL
VAMNEFSTLPLPNLRVVRGTQVYDGKFAIFVMLNYNTNSSHALRQLRLTQLTEILSGGVYIEKNDKLCH
MDTIDWRDIVRDRDAEIVVKDNGRSCPPCHEVCKGRCWGPGSEDCQTLTKTICAPQCNGHCFGPNPNQC
CHDECAGGCSGPQDTDCFACRHENDSGACVPRCPQPLVANKLTFQLEPNPHTKYQYGGVCVASCPHNFV
VDQTSCVRACPPDKMEVDKNGLKMCEPCGGLCPKACEGTGSGSRFQTVDSSNIDGFVNCTKILGNLDEL
ITGLNGDPWHKIPALDPEKLNVFRTVREITGYLNIQSWPPHMHNFSVESNLTTIGGRSLYNRGFSLLIM
KNLNVTSLGERSLKEISAGRIYISANRQLCYHHSLNWTKVLRGPTEERLDIKHNRPRRDCVAEGKVCDP
LCSSGGCWGPGPGQCLSCRNYSRGGVCVTHCNFLNGEPREFAHEAECFSCHPECQPMEGTATCNGSGSD
TCAQCAHFRDGPHCVSSCPHGVLGAKGPIYKYPDVQNECRPCHENCTQGCKGPELQDCLGQTLVLIGKT
HLTDKTHTCPPCPAPELLGGPSVFLFPPKPKDTLYITREPEVTCVVVDVSHEDPEVKENWYVDGVEVHN
AKTKPREEQYNSTYRVVSVLTVLHQDWLNGKEYKCKVSNKALPAPIEKTISKAKGQPREPQVYTLPPSR
EEMTKNQVSLTCLVKGFYPSDIAVEWESNGQPENNYKTTPPVLDSDGSFFLYSKLTVDKSRWQQGNVFS
CSVLHEALHSHYTQKSLSLSPG
>EN2642 Full length hinge Chain 1
SEQ ID NO: 668
MGWSCIILFLVATATGVHSLEEKKVCQGTSNKLSQLGTFEDHELSLQRMENNCEVVLGNLEITYVQRNY
DLSFLKTIQEVAGYVLIALNTVERIPLENLQIIRGNMYYENSYALAVLSNYDANKTGLKELPMRNLQEI
LHGAVRFSNNPALCNVESIQWRDIVSSDFLSNMSMDFQNHLGSCQKCDPSCPNGSCWGAGEENCQKLTK
IICAQQCSGRCRGKSPSDCCHNQCAAGCTGPRESDCLVCRKFRDEATCKDTCPPLMLYNPTTYQMDVNP
EGKYSFGATCVKKCPRNYVVTDHGSCVRACGADSYEMEEDGVRKCKKCEGPCRKVCNGIGIGEFKDSLS
INATNIKHFKNCTSISGDLHILPVAFRGDSFTHTPPLDPQELDILKTVKEITGFLLIQAWPENRTDLHA
FENLEIIRGRTKQHGQFSLAVVSLNITSLGLRSLKEISDGDVIISGNKNLCYANTINWKKLFGTSGQKT
KIISNRGENSCKATGQVCHALCSPEGCWGPEPRDCVSCRNVSRGRECVDKCKLLEGEPREFVENSECIQ
CHPECLPQAMNITCTGRGPDNCIQCAHYIDSPHCVKTCPAGVMGENNTLVWKYADAGHVCHLCHPNCTY
GCTGPGLEGCPTNGPKIPSEPKSCDKTHTCPPCPAPELLGGPSVFLFPPKPKDTLMISRTPEVTCVVVD
VSHEDPEVKFNWYVDGVEVHNAKTKPREEQYNSTYRVVSVLTVLHQDWLNGKEYKCKVSNKALPAPIEK
TISKAKGQPREPQVYTLPPSRDELTKNQVSLTCLVKGFYPSDIAVEWESNGQPENNYKTTPPVLDSDGS
FFLYSKLTVDKSRWQQGNVFSCSVMHEALHNHYTQKSLSLSPGK
EN2642 with Full length hinge Chain 1 without the signal sequence
SEQ ID NO: 669
LEEKKVCQGTSNKLSQLGTFEDHELSLQRMENNCEVVLGNLEITYVQRNYDLSELKTIQEVAGYVLIAL
NTVERIPLENLQIIRGNMYYENSYALAVLSNYDANKTGLKELPMRNLQEILHGAVRESNNPALCNVESI
QWRDIVSSDFLSNMSMDFQNHLGSCQKCDPSCPNGSCWGAGEENCQKLTKIICAQQCSGRCRGKSPSDC
CHNQCAAGCTGPRESDCLVCRKERDEATCKDTCPPLMLYNPTTYQMDVNPEGKYSFGATCVKKCPRNYV
VTDHGSCVRACGADSYEMEEDGVRKCKKCEGPCRKVCNGIGIGEFKDSLSINATNIKHFKNCTSISGDL
HILPVAFRGDSFTHTPPLDPQELDILKTVKEITGELLIQAWPENRTDLHAFENLEIIRGRTKQHGQFSL
AVVSLNITSLGLRSLKEISDGDVIISGNKNLCYANTINWKKLFGTSGQKTKIISNRGENSCKATGQVCH
ALCSPEGCWGPEPRDCVSCRNVSRGRECVDKCKLLEGEPREFVENSECIQCHPECLPQAMNITCTGRGP
DNCIQCAHYIDSPHCVKTCPAGVMGENNTLVWKYADAGHVCHLCHPNCTYGCTGPGLEGCPTNGPKIPS
EPKSCDKTHTCPPCPAPELLGGPSVFLFPPKPKDTLMISRTPEVTCVVVDVSHEDPEVKENWYVDGVEV
HNAKTKPREEQYNSTYRVVSVLTVLHQDWLNGKEYKCKVSNKALPAPIEKTISKAKGQPREPQVYTLPP
SRDELTKNQVSLTCLVKGFYPSDIAVEWESNGQPENNYKTTPPVLDSDGSFFLYSKLTVDKSRWQQGNV
FSCSVMHEALHNHYTQKSLSLSPGK
>EN2642 with Full length hinge Chain 2
SEQ ID NO: 670
MGWSCIILFLVATATGVHSSEVGNSQAVCPGTLNGLSVTGDAENQYQTLYKLYERCEVVMGNLEIVLTG
HNADLSFLQWIREVTGYVLVAMNEFSTLPLPNLRVVRGTQVYDGKFAIFVMLNYNTNSSHALRQLRLTQ
LTEILSGGVYIEKNDKLCHMDTIDWRDIVRDRDAEIVVKDNGRSCPPCHEVCKGRCWGPGSEDCQTLTK
TICAPQCNGHCFGPNPNQCCHDECAGGCSGPQDTDCFACRHENDSGACVPRCPQPLVANKLTFQLEPNP
HTKYQYGGVCVASCPHNFVVDQTSCVRACPPDKMEVDKNGLKMCEPCGGLCPKACEGTGSGSRFQTVDS
SNIDGFVNCTKILGNLDFLITGLNGDPWHKIPALDPEKLNVERTVREITGYLNIQSWPPHMHNESVESN
LTTIGGRSLYNRGFSLLIMKNLNVTSLGERSLKEISAGRIYISANRQLCYHHSLNWTKVLRGPTEERLD
IKHNRPRRDCVAEGKVCDPLCSSGGCWGPGPGQCLSCRNYSRGGVCVTHCNFLNGEPREFAHEAECFSC
HPECQPMEGTATCNGSGSDTCAQCAHERDGPHCVSSCPHGVLGAKGPIYKYPDVQNECRPCHENCTQGC
KGPELQDCLGQTLVLIGKTHLTEPKSCDKTHTCPPCPAPELLGGPSVFLFPPKPKDTLMISRTPEVTCV
VVDVSHEDPEVKFNWYVDGVEVHNAKTKPREEQYNSTYRVVSVLTVLHQDWLNGKEYKCKVSNKALPAP
IEKTISKAKGQPREPQVYTLPPSRDELTKNQVSLTCLVKGFYPSDIAVEWESNGQPENNYKTTPPVLDS
DGSFFLYSKLTVDKSRWQQGNVFSCSVMHEALHNHYTQKSLSLSPGK
En2642 >EN2642 with Full length hinge Chain 2without the SIGNAL
sequence
SEQ ID NO: 671
SEVGNSQAVCPGTLNGLSVTGDAENQYQTLYKLYERCEVVMGNLEIVLTGHNADLSFLQWIREVTGYVL
VAMNEFSTLPLPNLRVVRGTQVYDGKFAIFVMLNYNTNSSHALRQLRLTQLTEILSGGVYIEKNDKLCH
MDTIDWRDIVRDRDAEIVVKDNGRSCPPCHEVCKGRCWGPGSEDCQTLTKTICAPQCNGHCFGPNPNQC
CHDECAGGCSGPQDTDCFACRHENDSGACVPRCPQPLVANKLTFQLEPNPHTKYQYGGVCVASCPHNFV
VDQTSCVRACPPDKMEVDKNGLKMCEPCGGLCPKACEGTGSGSRFQTVDSSNIDGFVNCTKILGNLDEL
ITGLNGDPWHKIPALDPEKLNVERTVREITGYLNIQSWPPHMHNFSVFSNLTTIGGRSLYNRGFSLLIM
KNLNVTSLGERSLKEISAGRIYISANRQLCYHHSLNWTKVLRGPTEERLDIKHNRPRRDCVAEGKVCDP
LCSSGGCWGPGPGQCLSCRNYSRGGVCVTHCNFLNGEPREFAHEAECFSCHPECQPMEGTATCNGSGSD
TCAQCAHFRDGPHCVSSCPHGVLGAKGPIYKYPDVQNECRPCHENCTQGCKGPELQDCLGQTLVLIGKT
HLTEPKSCDKTHTCPPCPAPELLGGPSVFLFPPKPKDTLMISRTPEVTCVVVDVSHEDPEVKENWYVDG
VEVHNAKTKPREEQYNSTYRVVSVLTVLHQDWLNGKEYKCKVSNKALPAPIEKTISKAKGQPREPQVYT
LPPSRDELTKNQVSLTCLVKGFYPSDIAVEWESNGQPENNYKTTPPVLDSDGSFFLYSKLTVDKSRWQQ
GNVFSCSVMHEALHNHYTQKSLSLSPGK

### B. Production of the Variants

[1085] Recombinant DNA encoding the constituent chains in the product designated EN2642 and the variants with extended half-life variants each were synthesized and subcloned into a mammalian expression vector with an N-terminal signal peptide for secreted expression. HEK293 cells were co-transfected with the EGFR/FC and the HER3/Fc expression plasmids at 1:1 ratio. Transfected cells were allowed to grow for 7 days at 37° C. The culture medium from each co-transfection was harvested, followed by the Protein A-affinity purification. The protein A-bound proteins were eluted, and the monomeric Fc fusion proteins were separated from aggregates and other contaminants using a size-exclusion column to result in the mixtures of heterodimers and homodimers.

### Results

[1086] The concentrations of the EN2642 and its variants were determined. The yields were ranging 327467 mg for each (out of ˜5L culture volume for each). The proteins are more than 98% pure as measured by SEC-HPLC and SDS-PAGE gels.

| Product | Ref. name | Yield (mg) | Purity |
|---|---|---|---|
| EN2642 | 7933-001 | 466.9 | >98% |
| EN2642-LS | 7933-005 | 328.9 | >98% |
| EN2642-YTE | 7933-006 | 341.1 | >98% |
| EN2642-LS + YTE | 7933-007 | 343.8 | >98% |

### Example 16

### Half-Life Engineering and Protein Production of EN2642 and the Variants

### Background

[1087] As described herein, antibody engineering has identified mutations in the IgG Fc that can extend in-vivo half-life. These mutations include the YTE (M252Y, S254T, T256E) and the LS (M428L, N434S) on IgG1 Fc (for a review, see Saunders K.O., Frontiers in Immunology. 2019). As described in the Examples, above, these mutations have been incorporated into constructs to produce the following variants (Table 40 below). The EN2642 variant with a full-length hinge (EN2642-Hinge) which is 5-amino-acid longer N-terminally than the parental and other variants (Table 40 below). The sequences and structures of the constructs comprising the chains in the variants are detailed in the Example above.

TABLE 40
Nomenclature and production volume

| | | | Production |
|---|---|---|---|
| Nomenclature | code | Mutation in Fc | vol. (L) |
| EN2642 | 7933-001 | Parent | 6 |
| EN-2642-FcLS | 7933-005 | LS | 4 |
| EN-2642-FcYTE | 7933-006 | YTE | 4 |
| EN-2642- FcLS + YTE | 7933-007 | LS + YTE | 4 |
| EN-2642-Hinge | 7933-008 | F.L. Hinge | 7 |

### Methods and Results

[1088] EN2642 and the variants were produced in CHO cells by co-transfection of the two plasmids encoding the EGFR/Fc and HER3/Fc respectively at a ratio of 1:1. The recombinant proteins expressed were one-step purified by protein A (MabSelect SuRe), and result in one heterodimer and two homodimers. Stability of the purified proteins was tested, and no noticeable difference was found by SEC-HPLC after 3 freeze-thaw cycles. All purified proteins have endotoxin levels <0.1 (LAL) EU/mg of proteins. The purified proteins are stored at −80° C.

TABLE 41
Yield of purified proteins

| Monomer | | | | | % HMV aggregation vs Monomer | | |
|---|---|---|---|---|---|---|---|
| | | Total yield | | | Amount | % | % |
| Name | code | (mg) | Purity | Mg/vial | (mg) | HMW* | monomer* |
| EN2642 | 7933- | 466.9 | >98% | 10 | 518.26 | 29.01 | 70.99 |
| | 001 | | | | | | |
| EN-2642-FcLS | 7933- | 328.9 | >98% | 10 | 434.19 | 42.81 | 57.19 |
| | 005 | | | | | | |
| EN-2642- | 7933- | 341.1 | >98% | 10 | 599.97 | 36.67 | 63.33 |
| FcYTE | 006 | | | | | | |
| EN-2642- | 7933- | 343.8 | >98% | 10 | 422.90 | 32.09 | 67.91 |
| FcLS + YTE | 007 | | | | | | |
| EN-2642- | 7933- | 326.7 | >98% | 10 | 731.87 | 54.21 | 45.79 |
| Hinge | 008 | | | | | | |

*% high molecular weight by SEC-HPLC
**% monomer by SEC-HPLC

### Example 17

### Purification of the Heterodimer of EN2642 and Variants

### A. Purification Method Employing Protein A Resin and Cation Exchange Chromatography

[1089] The heterodimer purification of this method is facilitated by the introduction of a pair of mutations, H435R and Y436F, in the Fc of the EGFR/Fc arm of EN2642. It is known that IgG3 does not bind protein A. Replacing the H435 and Y436 of IgG1Fc with the corresponding amino acids Arg and Phe of IgG3 ablates binding of the mutant IgG1Fc to protein A (FIG. 16). Since the pair of mutations introduced into IgG1 Fc is native to IgG3, it is not immunogenic. This method has been applied to the purification of bispecific antibodies that contain a single common light chain and 2 distinct heavy chains (see, Tustian (2016 May-June) MAbs 8(4):828-38. Doi:10.1080/19420862.2016.1160192. Epub 2016 Mar. 10).

[1090] As shown in the table below EGFR(HER1)/Fc:HER3 heterodimer and its co-expressed homodimers are biochemically similar (Table 42 below). To facilitate the heterodimer separation, a pair of mutations, H435R and Y436F, critical for binding to the protein A, were introduced into the Fc portion of the EGFR(HER1)/Fc arm to create a mutant designated EGFR/Fc*. EGFR/Fc* does not bind to protein A and thus is in the flowthrough during protein A column purification, whereas the EGFR/Fc*:HER3/Fc heterodimer and the HER3/Fc homodimer have the intermediate and strong binding, respectively, to protein A resin. See FIG. 16, which depicts binding of IgG1Fc to protein A is ablated by the H435R-Y436F mutations. Co-expression of the IgG1Fc mutant with a wildtype IgG1Fc creates a mixture of the homodimers and heterodimer, each of which has a distinct binding affinity to protein A.

TABLE 42
EGFR/Fc:HER3 heterodimer and its co-expressed
homodimers are biochemically similar

| | Theoretical MW (Kd) | N-glyco. | pI |
|---|---|---|---|
| EGFR/Fc homodimer | 187.95 | 24 | 7.37 |
| EGFR/Fc:HER3/Fc | 187.90 | 23 | 7.4 |
| HER3/Fc homodimer | 187.86 | 22 | 7.47 |

### B. Optimization of DNA Co-Transfection Ratio Facilitates the Heterodimer Purification.

[1091] Three DNA co-transfection ratios were tested to identify the best one for separation of the heterodimer from the homodimers. It was found that EGFR/Fc* homodimer primarily goes into the flowthrough and the residual portion was easy to remove. Heterodimer and the HER3/Fc homodimer were partially overlapping. Optimization of DNA co-transfection ratio indicates that a 4:1 EGFR/Fc:HER3/Fc DNA co-transfection reduces the HER3/Fc homodimer that overlaps with the heterodimer, thereby facilitated separation of the heterodimer, see FIG. 17.

[1092] Co-expressed homodimer and heterodimer mixtures can be separated on CEX-chromatograph using purified EGFR/Fc and HER3/Fc homodimers as column chromatograph retention time (RT) markers. For example, mixing the purified heterodimer with the EGFRFc and HER3Fc homodimer, and then running the mixed sample on a CEX-HPLC showed that each of the three components in the mixture has its distinct migration peak, see FIG. 18.

Separation of Heterodimer from HER3 Homodimer is Increased Using PrismA Resin.

[1093] Different Protein A media were tested for separation of the heterodimer from the HER3Fc homodimer. The pH gradient-PrismA yields better separation between the heterodimer and HER3/Fc homodimer than that of the pH gradient-MabSelect SuRe, see FIG. 19 which illustrates that the better separation of homodimers and heterodimers when using PrismA resin.

[1094] The pH-gradient coupled with a catastrophic salt modifier results in improved separation of heterodimer from the HER3/Fc homodimer. Since the mutations in the EGFR/Fc arm ablate its binding to protein A, the heterodimer and the HER3 homodimer bound to the PrismA column can be eluted with different pH. A gradient pH from 5 to 3 was used to elute the bound proteins. It was shown that a catastrophic salt modifier such as 500 mM of CaCl₂) facilitated the separation of the heterodimer from the HER3Fc.

### Protocol for Heterodimer Purification

[1095] Protocol for heterodimer purification is illustrated in FIGS. 20A-20H, and as follows.

[1096] Step 1 (FIG. 20A): 2650 mL of supernatant from a 4:1 HER1:HER3 co-expression in CHO cells is collected and run on the column. The sample is washed with EQ buffer comprising 25 mM Tris, 150 mM NaCl, and 5 mM EDTA, at pH 7.5, followed by a wash with Wash buffer comprised of 50 mM NaAC, 500 mM CaCl₂) at pH 7.5. 55 mL of flowthrough is transferred to a PrismA column and washed with elution buffer comprising a 30 CV gradient from 50 mM NaAC, 500 mM CaCl₂), pH 5.5 to 50 mM NaAC, 500 mM CaCl₂) at pH 3.0. A gradient pH (pH 5.5-3.0) with salt modifier was used to elute the bound proteins.

[1097] QC for Step1 includes 1) SEC-HPLC to estimate the percentage of aggregation in the eluted pool, and 2) CEX-HPLC to determine the column retention time for the heterodimer (7.98 min) as compared to the purified HER1 (7.66 min) and HER3 (8.58 min) homodimer as the markers for their respective retention times.

[1098] QC for Step 2 (FIG. 20F) includes 1) SEC-HPLC to check the aggregation; and 2) CEX-HPLC to determine the purity of heterodimers based on the column retention time as compared to that of the homodimer markers.

C. Alternative Purification Method Using Cation Exchange Chromatography that Does not Require Modification of the Fc

[1099] Provided is a parallel method for the heterodimer purification from the mixture of EN2642 or the variants. A benefit of this method is that is does not require the H435R and Y436F mutations engineered into the Fc so the Fc portion of the fusion protein remains wildtype or modified as described herein. This method does not require additional mutations or engineering. It uses the separation power of the cation exchange (CEX) polishing chromatography since each of the homodimers and the heterodimer has its distinct retention time on the CEX polishing column and can be sufficiently separated and eluted under the optimized condition. The method of separation and purification is shown in FIGS. 21A-J and as follows:

[1100] Step 1 (FIGS. 21A-C) The retention time of each of the homodimers (purified EGFR-Fc homodimer, HER3-Fc homodimer, and EN2642 monomer) was measured on CEX-HPLC columns and each showed distinct retention times.

[1101] Step 2 (FIG. 21D) 10 mg of purified EN2642 (7933-008) was run on a CEX polishing column, the sample was washed with EQ buffer, 50 mM NaAc, pH 5.5, and eluted using 30 CV gradient from 50 mM NaAC, pH 5.5 to 50 mM NaAC, 1M NaAC, pH 5.5 at flow rate of 1 mL/min. 2.5 mg of purified heterodimer was yielded in the collected fractions

[1102] QC (FIGS. 21E-J) quality control was done and showed that collected fractions show retention times on CEX-HPLC consistent with expected heterodimer retention time. Purified HER1 (7.66 min) and HER3 (8.58 min) homodimer are used as the markers for their respective retention times.

### Example 18

### Exemplary Oligo-Trap Compositions and Cell Lines

### 1. Stable Expression of Homodimers and Heterodimers

[1103] Molecules were expressed from single CHO cell lines and purified as described in the above examples (see, also Jin et al. (2009) Mol Med 15:11-20, doi.org/10.2119/molmed.2008.00103, US publication US20100055093A1, and corresponding International PCT Publication No. WO2007/146959).

[1104] Stable expression of each component of the Oligo-trap was established using reverse-phase high-performance liquid chromatography of proteins using an analytic C4 column (50×46×5 mm; 300 Å) from Phenomenex, attached to an AKTA Purifier System (GE Healthcare). Buffer A contained 0.1% trifluoroacetyl or trifluoroacetic acid (v/v) in water, and buffer B consisted of 25% 2-propanol, 75% acetonitrile, and 0.1% trifluoroacetyl or trifluoroacetic acid (v/v). Typically, 25 g of protein were loaded and a linear gradient of 55% to 72% buffer B was used to elute samples (flow rate, 1.0 mL/min; gradient, 1.21%/min). By this reverse-phase high-performance liquid chromatography, the HER-3/Fc homodimer (oHER3:Fc) elutes first, followed by the heterodimer (oEGFR-Fc: oHER3-Fc) and then the oEGFR-Fc homodimer. Peaks were identified using two approaches: First, standards purified from singly transfected cells (coded for only one polypeptide chain) were used to identify the homodimer peaks. Second, fractions from each peak were submitted for NH₂-terminal sequencing to confirm identity. The HPLC analysis of the purified fusion proteins is shown in FIG. 5.

[1105] Ligand binding results showed that the optimized receptor-Fc molecules have at least a 10-fold improved binding for the growth factors tested than the parent (non-optimized) receptor-ligand trap (Table 43 below).

TABLE 43
Affinity-optimized mutants are more potent than
their parent from in inhibition of growth factor
induced EGFR and HER3 phosphorylation

| | Approximate EC₅₀ (nM) | | |
|---|---|---|---|
| | EGF | TGF-α | NGR1-β |
| EGFR/Fc | 11.6 | 11.4 | NT |
| EGFR^{T15S}/Fc | 2.2 | 1.0 | NT |
| HER3/Fc | NT | NT | 45.5 |
| HER3^{Y246A}/Fc | NT | NT | 1.5 |
| RB200 | 117.3 | 199.0 | 25.1 |
| RB242 | 1.8 | 19.4 | 1.7 |

[1106] Shown in the Table are the EC50 values for HER/Fc-mediated inhibition of receptor phosphorylation. Serum-starved cells were treated with 3 nM EGF or TGF-α (N87 cells), or with NRG1-0 (MCF7 cells), in the presence of increasing concentrations of the homodimer and heterodimer inhibitors. Cells were lysed 10 min later. Lysates were analyzed for the presence of phosphorylated EGFR or HER3 using a quantitative phosphotyrosine-ELISA assay. NT:not tested.

[1107] Cell lines encoding combinations of the two chains in each of the variants (SEQ ID NOs: 655-671) described in the Example above are provided. The encoding nucleic acid can include the signal sequence included in these sequences, or other signal sequences as appropriate for expression in the particular cell.

2. Efficacy Advantages of the Optimized Oligo-Trap Vs. The oEGFR-IgG Fc: oHER3-IgG Fc Heterodimer

[1108] FIG. 8 shows a comparison of the ability of the Oligo-trap mixture of optimized EGFR (oEGFR (HER1)), optimized HER3 (oHER3) homodimer Fc IgG fusion proteins, and the optimized heterodimer compared to ability of the optimized heterodimer alone to inhibit tumor cell growth.

[1109] FIG. 6 shows a comparison of the mixture with known anti-tumor antibody drugs. The results show that the Oligo-trap is more potent than the heterodimer, reaching its EC50 at 8 nM vs. 107 nM for the heterodimer. The results also show that the mixture is more potent than commercial antibody therapeutics that target an EGFR family member, and also more potent than an anti-HER3 homodimer.

[1110] The table below summarizes the results of the effects of the efficacy of the EGFR:HER3 Oligo-trap in murine human tumor xenograft models.

| | Maximum | Combined with | Combined with |
|---|---|---|---|
| | Tumor Growth | Carboplatin | Docetaxel |
| Model | Inhibition | (25 mg/kg) | (15 mg/kg) |
| NSCLC (H460) | 20% (3 mg/kg) | ND | ND |
| | 52% (30 mg/kg) | | |
| NSCLC (H292) | 20% (3 mg/kg) | 62% | ND |
| NSCLC (H292) | 50% (40 mg/kg) | ND | 83% |

ND = not done

### Example 19

### Surface Plasmon Resonance a Determination of Binding Affinity of EN2642 and Variants and Binding Assays

[1111] Provided herein are oligo-trap constructs that comprise mixtures of heterodimers and homodimers (and in some embodiments higher order structures), that act to inhibit cell surface receptors, particularly EGFR family members by trapping ligands therefor. There are eleven (11) ligand/growth factor families that activate the HER (EGFR) family. These are: EGF, TGF-alpha, AREG, EPGN are specific for the EGFR, while HB-EGF, EREG, and BTC activate both the EGFR and HER4; NRG-1, 2 activate HER3 and NRG-3,4 activate HER4, where the abbreviations are as follows:
[1112] Amphiregulin (AREG)
[1113] Epiregulin (EREG)
[1114] Epigen (EPGN)
[1115] Heparin Binding EGF (HB-EGF)
[1116] Betacellulin (BTC)
[1117] Neuregulin (NRG)

[1118] Heparin Binding EGF is paracrine and/or autocrine chemotactic factor and as a mitogen that mediates HER1 and/or HER4 in the invasion and metastasis.

[1119] HER4 is distinct from the other receptors in that it has important roles in cardiomyocyte survival, neuronal maintenance, and has been characterized as an oncogene and a tumor suppressor gene. Epidermal growth factor receptor (EGFR) regulates many cellular programs, with seven different activating ligands shaping cell signaling in distinct ways. EGFR ligands epiregulin (EREG) and epigen (EPGN) stabilize different dimeric conformations of the EGFR extracellular region. As a consequence, EREG or EPGN induce less stable EGFR dimers than EGF-making them partial agonists of EGFR dimerization.

[1120] Amphiregulin (AREG) is a member of the epidermal growth factor (EGF) family and is expressed in a plethora of neoplasms, including ovarian, breast, bladder, colon, lung, major salivary glands, and pancreatic cancers. AREG interacts with epidermal growth factor receptor (EGFR) to trigger numerous signaling cascades that mediate cell survival, proliferation, and motility. AREG has been shown to play a role in cell invasion and metastasis in ovarian cancer and breast cancer. FIG. 10 depicts growth factor cross-signaling in the EGFR family; see also, FIG. 7. FIG. 22 depicts the structures of various constructs.

[1121] As discussed in sections above, an effective ligand trap (oligo-trap) composed of the extracellular domain of a receptor fused to a half-life extender must have about the same or better ligand affinity than the cell membrane-associated receptor in order to compete for ligand binding with it effectively. The extracellular domains of many cytokine receptors retain high affinity for their cognate ligands, exemplified by etanercept (Fc-mediated dimer of TNFR2) and rilonacept (Fc-mediated dimer of the IL-1R). The extracellular domains of the EGFR family lose most of their affinity when not part of the intact transmembrane receptor, thus, posing a challenge for preparing effective ligand trapping therapeutics. The mixtures provided herein that include affinity modified ECDs linked to modified Fc's which result in therapeutics that have sufficient avidity to trap ligands.

[1122] As shown in FIG. 10 and demonstrated in Examples herein and described herein, HER3 is activated by NRG1 and 2; but not by other NRG growth factors; HER 4 is activated by some members of the EGF family (HB-EGF, for example). HER4 also is activated by NRG3 and 4. The exemplified oligo traps herein that comprise the HER1 oECD and the HER3 oECD, capture everything but NRG3 and 4. Because HER4, is involved in the preservation of and replenishment of cardiomyocytes, HER4 is not targeted. Also, dysfunction in HER4 also is associated with schizophrenia and some other neuropathologies. HER4 has been associated with fewer cancers than the other members of the HER family, and has, in fact, been reported to have a tumor suppressor function. Hence, the exemplified constructs and mixtures do not target or bind NRG3 and 4 alone to preserve HER4 function so as to avoid or minimize cardio pathologies and neuropathologies.

[1123] Results of the following experiments demonstrate ligands targeted by the exemplified mixtures of homodimers and heterodimers, and show that the mixtures have high affinity for targeted ligand.

### Materials and Methods

[1124] Commercially available growth factors for SPR binding were purchased. EN2642 and its variant (7933-001 with the full-length hinge) were produced by known methods, including methods described herein. They can be produced by co-expression of nucleic acid encoding the two chains that form the heterodimers in the mixture, and as shown herein, reproducible ratios of the component products in the mixture are produce.

[1125] For Surface Plasmon Resonance (SPR) binding, a Biacore® 8K Instrument was used. The measurement used the Biacore™ Sensor Chip CM5. First, an anti-human Fc was immobilized onto the Chip. Subsequently, EN2642 or its variant was allowed to bind to the anti-human Fc coated chip, followed by the flow-through and wash-off of each of the growth factors using standard measurement procedures. SPR analyses of the growth factor binding affinity of EN-2642 and variants were performed. In general, for each ligand, two samples were analyzed and results were reproducibly similar.

### Binding Assays

[1126] Binding assays of EN2642 (7933-001) and EN2642 with the FL Fe hinge (7933-008) against immobilized human anti-Fc antibodies also were performed.
[1127] Conditions were as follows:
[1128] Instrument: Biacore™ 8K
[1129] Sensorchip: CM5
[1130] Immobilized ligand: anti-human Fc
[1131] Assay buffer 1: HBS-EP+ (10 mM HEPES pH7.4, 150 mM NaCl, 3 mM EDTA,
[1132] 0.05% Tween 20)
[1133] Assay buffer 2: HBS-EP+ with 1 mg/mL BSA*
[1134] Assay temperature: 25° C.
[1135] Capture: 90s, 5 uL/min
[1136] Association: 90s, 30 uL/min
[1137] Dissociation: 300s
[1138] Regeneration: 3M MgCl₂, 30s*3

### Results

[1139] The results of the binding assays show that the EN2642 mixtures 7933_001 and 7933_008 each have comparable affinity against all ligands tested. Among all the ligands tested, HB-EGF has the highest affinity (double-digit pM) against 7933_001 and against 7933_008, (double-digit pM). The growth factors huEGF, NRG1, Betacellulin and TGFa have sub or single-digit nM affinity; Amphiregulin, Epigen and Epiregulin have double-digit nM affinity. No KD was determined for NRG3 due to significant concentration-dependent binding to reference and weaker response at active flow cell compared to reference flow cell.

TABLE 44A
SPR binding of growth factors to EN2642
and its Variant with full length hinge

| | | | | Affinity |
|---|---|---|---|---|
| Sample | Growth factor | ka (1/s*M) | Kd (1/w) | KD (M) |
| EN-2642 7933- | huEGF_R&D | 2.06E+06 | 1.43E−03 | 6.95E−10 |
| 001 | | 3.18E+06 | 1.69E−03 | 5.33E−10 |
| | NRG1_R&D | 4.05E+07 | 7.71E−03 | 1.90E−10 |
| | NRG3* | | | \ |
| | TGFa | 2.79E+06 | 2.94E−03 | 1.05E−09 |
| | Amphiregulin | 9.15E+06 | 1.50E−01 | 1.64E−08 |
| | rhEpigen | 9.01E+05 | 3.33E−02 | 3.69E−08 |
| | Epiregulin | 3.67E+06 | 1.10E−01 | 3.00E−08 |
| | Betacellulin | 2.31E+06 | 8.72E−04 | 3.78E−10 |
| | HB-EGF | 2.22E+07 | 1.38E−03 | 6.20E−11 |
| EN-2642 with - | huEGF_R&D | 3.25E+06 | 2.01E−03 | 6.18E−10 |
| full length Hinge | | 2.95E+06 | 1.65E−03 | 5.59E−10 |
| 7933-008 | NRG1-R&D | 3.56E+07 | 1.26E−02 | 3.55E−10 |
| | NRG3* | | | |
| | TGFa | 5.55E+06 | 5.89E−03 | 1.06E−09 |
| | Amphiregulin | 4.72E+06 | 1.30E−01 | 2.75E−08 |
| | rhEpigen | 3.67E+06 | 1.10E−01 | 3.00E−08 |
| | Epiregulin | 3.55E+06 | 1.04E−01 | 2.94E−08 |
| | Betacellulin | 2.34E+06 | 1.03E−03 | 4.40E−10 |
| | HB-EGF | 4.64E+07 | 4.07E−03 | 8.77E−11 |

[1140] The table below shows a comparison among the homodimer/heterodimer mixture (EN2642) and each of the homodimers.

### Summary of Binding Results in Table 44A

[1141] 7933_001 and 7933_008 (001 and 008) were captured onto Biacore™ Sensor Chip CM5 immobilized with anti-human Fc. huEGF shows binding to 001 and 008. NRG1 shows binding to both 001 and 008. No significant binding was observed for NRG2 and N<G4 against both 001 and 008.

TABLE 44B
Binding of each of the homodimers compared to EN2642, the mixtures of heterodimers and homodimers

| EGF family | | | | | | | | | |
|---|---|---|---|---|---|---|---|---|---|
| of growth | EGFR/FC | | | HER3/FC | | | EN2642 | | |
| factor | ka | kd | KD (M) | ka | kd | KD (M) | ka | kd | KD (M) |
| Amphiregulin | 1.56E+07 | 8.23−02 | 5.29e−09 | \ | \ | \ | 9.15E+06 | 1.50E−01 | 1.65E−08 |
| Betacellulin | | * | <1.00e−11 | \ | \ | \ | 2.31E+06 | 8.72E−04 | 3.78E−10 |
| Epigen | 9.91E+05 | 2.42E−02 | 2.45E−08 | \ | \ | \ | 9.01E+05 | 3.33E−02 | 3.69E−10 |
| Epiregulin | 3.31E+06 | 9.29E−02 | 2.81E−08 | \ | \ | \ | 3.67E+06 | 1.10E−02 | 3.00E−08 |
| HB-EGF | 1.31E+07 | 6.08E−04 | 4.65E−11 | \ | \ | \ | 2.22E+07 | 1.38E−03 | 6.20E−11 |
| EGF | 5.36E+06 | 2.23E−04 | 4.15E−11 | \ | \ | \ | 2.06E+06 | 1.43E−03 | 6.95E−11 |
| TGF-alpha | 3.64E+06 | 1.83E−04 | 5.03E−11 | \ | \ | \ | 2.79E+06 | 2.94E−03 | 1.05E−09 |
| NRG1-beta | \ | \ | \ | 9.76E+08 | 3.79E−01 | 3.89E−10 | 4.05E+07 | 7.71E−03 | 1.90E−10 |
| NRG2-beta | \ | \ | \ | 5.71E+05 | 2.47E−02 | 4.33E−08 | 1.17E+06 | 8.85E−0 | 7.54E−08 |

* out of top range; little dissociation observed within 700 sec, curve fitting not possible

[1142] The results confirm previous ELISA data and show that the mixture EN-2642 is a high-affinity growth factor binder. SPR binding of growth factors to EN2642 and its variant demonstrate the constructs and mixtures provided herein bind to their growth factors with high affinity.

[1143] SPR binding experiments (Table 44B) confirmed the ELISA binding results that constructs (EN2140, EN2320, EN2642) provided herein have significantly improved binding affinity to 9 of the 11 EGFR growth factor family members compared to the first generation constructs. As described herein, the other 2 members of the growth factor family only bind to HER4, which is not included in these constructs. The EGFR/Fc homodimer (EN2140) had GF binding affinity than the EN2642 heterodimer mixture. The high affinity ligand binding of these constructs correlates with correlates with their inhibitory activities to the GF-induced proliferation of the cancer cells (see Example below).

### Example 20

A Comparison of the Pharmacokinetics (PK) of Five Fc Fusion Proteins after Intravenous Administration to B-hFcRn Mice

[1144] In this Example, serum pharmacokinetics of 5 Fc fusion proteins after a single intravenous administration in B-hFcRn mice were compared; results are shown in table 45.

### Methods

[1145] An ELISA method was developed, and five parameters were optimized. The five parameters were: 1) the concentration of the added biological matrix (serum), 2) the selection of blocking reagent and optimized concentration, 3) the selection of sample diluent, 4) the concentrations of the capture antibody, and 5) the diluent folds of detection antibody. The range of calibration curve, accuracy, and precision of the ELISA method was validated before in vivo dosing. 60 B-hFcRn mice were randomly enrolled into five groups according to body weight. Each group consisted of 12 mice and was further divided into four subgroups, each with 3 mice. The five groups were G1 7933-001, G2 7933-005, G3 7933-006, G4 7933-007, and G5 7933-008. All test articles were intravenously administered to B-hFcRn mice at a dose of 10 mg/kg on Day 0. The body weight was measured and recorded twice a week. Two blood samples (70 L) were collected from each animal alternately over 21 days, and terminal blood samples (maximum volume) were collected on day28. Time points for pharmacokinetic analysis included 4 hours, day 1, day 2, day 3, day 5, day 7, day 14, day 21 and day 28. Blood collected from 5 untreated mice was used as blank serum.

TABLE 45
Serum Pharmacokinetics of Fc fusion proteins

| Captured | | | | | | Rmax | |
|---|---|---|---|---|---|---|---|
| ligand | Analyte | ka (1/s*M) | kd (1/s) | KD (M) | Chi2 | (RU) | t_{1/2} (s) |
| 7933-001 | huEGF | 2.06E+06 | 1.43E−03 | 6.95E−10 | 2.04E+00 | 28.3 | 4.84E+02 |
| | | 3.18E+06 | 1.69E−03 | 5.33E−10 | 5.59E−02 | 15.5 | 4.09E+02 |
| | NRG1 | 4.05E+07 | 7.71E−03 | 1.90E−10 | 3.61E−02 | 7.8 | 8.99E+01 |
| | NRG3* | | \ | | | | |
| | TGFa | 2.79E+06 | 2.94E−03 | 1.05E−09 | 6.30E−02 | 12.5 | 2.36E+02 |
| | Amphiregulin | 9.15E+06 | 1.50E−01 | 1.64E−08 | 5.71E−01 | 27.4 | 4.63E+00 |
| | rhEpigen | 9.01E+05 | 3.33E−02 | 3.69E−08 | 1.50E−01 | 14.0 | 2.08E+01 |
| | Epiregulin | 3.67E+06 | 1.10E−01 | 3.00E−08 | 1.23E−01 | 9.5 | 6.29E+00 |
| | Betacellulin | 2.31E+06 | 8.72E−04 | 3.78E−10 | 1.03E+00 | 46.2 | 7.95E+02 |
| | HB-EGF | 2.22E+07 | 1.38E−03 | 6.20E−11 | 1.56E+00 | 43.1 | 8.31E+07 |
| 7933-008 | huEGF | 3.25E+06 | 2.01E−03 | 6.18E−10 | 7.09E−02 | 24.1 | 3.45E+02 |
| | | 2.95E+06 | 1.65E−03 | 5.59E−10 | 3.82E−02 | 12.6 | 4.21E+02 |
| | NRG1 | 3.56E+07 | 1.26E−02 | 3.55E−10 | 1.20E−01 | 12.0 | 5.48E+01 |
| | NRG3* | | | \ | | | |
| | TGFa | 5.55E+06 | 5.89E−03 | 1.06E−09 | 7.00E−02 | 10.3 | 1.18E+02 |
| | Amphiregulin | 4.72E+06 | 1.30E−01 | 2.75E−08 | 2.00E−01 | 20.1 | 5.34E+00 |
| | rhEpigen | 3.67E+06 | 1.10E−01 | 3.00E−08 | 1.23E−01 | 9.5 | 6.29E+00 |
| | Epiregulin | 3.55E+06 | 1.04E−01 | 2.94E−08 | 3.48E−02 | 7.2 | 6.66E+00 |
| | Betacellulin | 2.34E+06 | 1.03E−03 | 4.40E−10 | 9.79E−01 | 41.8 | 6.72E+02 |
| | HB-EGF | 4.64E+07 | 4.07E−03 | 8.77E−11 | 6.58E−01 | 33.9 | 5.49E+07 |

*For NRG3 (see table) concentration-dependent binding to reference is observed upon titration and signal in reference flow cell exceeds signal in active flow cells; therefore, no curve fitting was available for NRG3

### Results

[1146] No adverse clinical signs were observed. The body weights of all groups gradually increased during this study, indicating a good tolerance of animals to test articles. The ELISA for measuring five Fc fusion proteins had a linear range of 62.5-4000 ng/mL. All the QC samples of the five proteins met the requirements of PK assay validation. Serum concentrations were measured in a majority of samples collected, and pharmacokinetic parameters for each fusion protein were estimated by noncompartmental analysis. The terminal half-life of 7933-001, 7933-005, 7933-006, 7933-007, and 7933-008 was 3.887 days, 8.740 days, 6.925 days, 7.681 days, and 6.687 days respectively. The Vd of 7933-001, 7933-005, 7933-006, 7933-007, and 7933-008 was 1694.650 mL/kg, 1368.266 mL/kg, 692.335 mL/kg, 795.483 mL/kg, and 3382.307 mL/kg respectively. The serum clearance of 7933-001, 7933-005, 7933-006, 7933-007, and 7933-008 was 302.191 mL/day/kg, 108.516 mL/day/kg, 69.301 mL/day/kg, 71.787 mL/day/kg, and 350.578 mL/day/kg respectively.

### Abbreviations

| Abbreviation | Full terms |
|---|---|
| PBS | Phosphate Buffered Saline |
| SD | Standard Deviation |
| SEM | Standard Error of the Mean |
| i.v. | Intravenous |
| hr | Hour |
| PK | Pharmacokinetics |
| Cal. | Calibration Curve |
| AP | Anchor Point |
| ULOQ | Upper Limit of Quantitation |
| LLOQ | Lower Limit of Quantitation |
| HQC | High Quality Control |
| LQC | Low Quality Control |
| MQC | Medium Quality Control |
| CTL | Control |
| SPL | Specimen |
| STD | Standard Curve |
| BLK | Blank |
| BLQ | Below Limit of Quantitation |
| OVRFLW | Overflow |
| ELISA | Enzyme-Linked Immunosorbent Assay |
| RE | Relative Deviation |
| CBS | Carbonate-Bicarbonate Buffer |
| BSA | Bovine Serum Albumin |
| CS | Casein |
| HRP | Horseradish Peroxidase |
| TMB | 3,3′,5,5′-Tetramethylbenzidine |
| MEAN | Average Value |
| R.T. | Room Temperature |
| MRD | Minimum Required Dilution |

[1147] The purpose of this study was to compare the serum pharmokinetic of 5 Fc fusion proteins after a single intravenous administration in B-hFcRn mice.

### Dosing Solution Preparation

| | | Dosing | | Management of |
|---|---|---|---|---|
| Categories | Articles | concentration | Preparation steps | remaining articles |
| Test article 1 | 7933- 001 | 1.0 mg/mL | 7933-001 was divided into three | Remaining stock solution |
| | | | aliquots and stored at −80° C. | was stored at −80° C. |
| | | | One aliquot (5 mg) was used for | The working |
| | | | PK study. On the day of dosing, | solution after each dosing |
| | | | one aliquot | was sent to the client after the |
| | | | (3.9 mg) was diluted with PBS to | study completion. |
| | | | make a working solution. The | |
| | | | working solution was stored at | |
| | | | 2.8° C., temporarily, and used at | |
| | | | room temperature within 4 hours | |
| | | | after preparation. | |
| Test article 2 | 7933-005 | 1.0 mg/mL | 7933-005 was divided into three | Remaining stock solution |
| | | | aliquots and stored at −80° C. | was stored at −80° C. |
| | | | One aliquot (5 mg) was used for | The working |
| | | | PK study. On the day of dosing, | solution after each dosing |
| | | | one aliquot | was sent to the client after |
| | | | (3.9 mg) was diluted with PBS to | the study completion. |
| | | | make a working solution. The | |
| | | | working solution was stored at | |
| | | | 2-8° C., temporarily, and used at | |
| | | | room temperature within 4 hours | |
| | | | after preparation. | |
| Test article 3 | 7933- 006 | 1.0 mg/mL | 7933-006 was divided into three | Remaining stock solution |
| | | | aliquots and stored at −80° C. | was stored at −80° C. |
| | | | One aliquot (5 mg) was used for | The working |
| | | | PK study. On the day of dosing, | solution after each dosing |
| | | | one aliquot | was sent to the client after |
| | | | (3.9 mg) was diluted with PBS | the study completion. |
| | | | to make a working solution. The | |
| | | | working solution was stored at | |
| | | | 2-8° C., temporarily, and used at | |
| | | | room temperature within 4 | |
| | | | hours after preparation. | |
| Test article 4 | 7933-007 | 1.0 mg/mL | 7933-007 was divided into three | Remaining stock solution |
| | | | aliquots and stored at −80° C. | was stored at −80° C. |
| | | | One aliquot (5 mg) was used for | The working |
| | | | PK study. On the day of dosing, | solution after each dosing |
| | | | one aliquot | was sent to the client after |
| | | | (3.9 mg) was diluted with PBS to | the study completion. |
| | | | make a working solution. The | |
| | | | working solution was stored at | |
| | | | 2.8°, C. temporarily, and used at | |
| | | | room temperature within 4 hours | |
| | | | after preparation. | |
| Test article 5 | 7933-008 | 1.0 mg/mL | 7933-008 was divided into three | Remaining stock solution |
| | | | aliquots and stored at −80° C. | was stored at −80° C. |
| | | | One aliquot (5 mg) was used for | The working |
| | | | PK study. On the day of dosing, | solution after each dosing |
| | | | one aliquot | was sent to the client after |
| | | | (3.9 mg) was diluted with PBS to | the study completion. |
| | | | make a working solution. The | |
| | | | working solution was stored at | |
| | | | 2-8° C., temporarily, and used at | |
| | | | room temperature within 4 hours | |
| | | | after preparation. | |

### Animals

| Species | Mus musculus |
|---|---|
| Strain | C57BL/6 |
| Name | B-hFcRn mice |
| Sex | Female |
| Body weight | 17-23 g |
| Age | 8-9 weeks |
| Animal No. | 65 (60 enrolled) |
| Animal supplier | Biocytogen Jiangsu Co., Ltd. |
| Production license No. | SCXK ( ) 2021-0003 |
| Quality certificate No. | 202303196 |

### Housing Management

[1148] Animals were housed in a specific pathogen free barrier at Animal center of Biocytogen Pharmaceuticals (Beijing) Co., Ltd. in individual ventilated cage (IVC). The animals were acclimatized for 7 days before the experiment. Temperature and humidity were controlled as listed below:
[1149] Temperature: 20-26° C.
[1150] Humidity: 40-70%
[1151] Lighting: every 12 hours
[1152] Cages: The bedding material was pressure sterilized corncob, which was changed once every two weeks. The identification labels for each cage contain the following information: number of animals, sex, strain, date received, treatment, group number, and the starting date of the experiment.
[1153] Diet and water: Animals had free access to autoclaved sterilized dry granule food and water during the entire study period. Food was SPF grade and purchased from Beijing KeaoXieli Feed Co., Ltd. Water was purified by ultrafiltration.
[1154] Animal identification: Ear tag

### Experimental Methods and Procedures

### PK Method Development and Validation

[1155] An ELISA assay was developed prior to in vivo dosing. 7933-001 and 7933-007 were used to develop ELISA method and the developed method also met the detection requirements of other proteins. Factors examined: the concentration of the added biological matrix (serum), the selection of blocking reagent and optimized concentration, the selection of sample diluent, the concentrations of the capture antibody, and the diluent folds of detection antibody. the range of calibration curve, accuracy, and precision of ELISA method.

[1156] The ELISA method was able to detect the concentration of the fusion protein for 3-5 half-lives in vivo. The concentration range of the calibration curve was wider than the range of the final ULOQ and LLOQ during ELISA method development. The final concentration points of the calibration curve met the requirements of precision and accuracy in the validation. The highest concentration point of the calibration curve was set as ULOQ; the lowest concentration point above blank as LLOQ.

[1157] The workflow of the PK method was as follows:
[1158] 1. Antibody dilution: Diluted the capture antibody to an appropriate concentration, then added 100 μL to each well, incubated at 2-8° C. overnight for antigen coating.
[1159] 2. Washed with PBS-T buffer 4 times.
[1160] 3. Blocked with 2% CS for 1 hr at 37° C.
[1161] 4. Washed with PBS-T buffer 4 times.
[1162] 5. Incubated with sample (1/20 diluted (MRD) in 1% CS), 100 μL/well for 1 hr at 37° C.
[1163] 6. Washed with PBS-T buffer 4 times.
[1164] 7. Incubated 2nd antibody with HRP in 1% CS (100 μL/well) for 1 hr at 37° C.
[1165] 8. Washed with PBS-T buffer 4 times.
[1166] 9. Added TMB 100 μL/well 10-20 min at R.T.
[1167] 10. Added Stop Solution 100 μL/well.

[1168] Read the plate at 450 nm and 630 nm.

[1169] The assay method of each test article was validated prior to in vivo dosing, the contents of the method validation were as follows:
[1170] 1. Calibration curve: Calibration curve fitting required that the RE of no less than 6 concentration points (excluding 0, Blank) should be no more than 20% (ULOQ and LLOQ should be no more than 25%).
[1171] Accuracy and Precision Run Validation: The tests were carried out by different technicians at different days. The inter and intra-assay precision and accuracy of standards and QC samples were determined. QC samples included: standard curve, ULOQ, LLOQ, HQC (80% of ULOQ concentration), MQC (20% of ULOQ concentration), LQC (4% of ULOQ concentration). For each QC sample the back-calculated concentration, relative deviation (RE %), coefficient of variation (CV %) and total error (TE %) were determined: RE<25%, CV<25%, TE %<30%, ULOQ. LLOQ TE<40%.

### Animal Grouping and Treatment

[1172] Mice were randomly enrolled into five study groups according to body weight. Each group included 2 mice. Dosing was started on the same day as grouping.

[1173] (Day 0). The administration schedule was shown in the table below:

| | | | | | Dosing | |
|---|---|---|---|---|---|---|
| Group | Test articles | No. of animals | Dosages | Dosing Route | Frequency | Dosing Times |
| G1 | 7933-001 | 12 | 10 mg/kg | i.v. | Single dose | 1 |
| G2 | 7933-005 | 12 | 10 mg/kg | i.v. | Single dose | 1 |
| G3 | 7933-006 | 12 | 10 mg/kg | i.v. | Single dose | 1 |
| G4 | 7933-007 | 12 | 10 mg/kg | i.v. | Single dose | 1 |
| G5 | 7933-008 | 12 | 10 mg/kg | i.v. | Single dose | 1 |

Notes:
a. Dosing volume was administered based on body weight (10 μL/g).

[1174] Animals were observed for 5 minutes post dosing to record any acute responses to the test article.

### Sample Collection and Analysis

[1175] Every group with 12 mice were divided into 4 subgroups (A, B, C and D), with 3 mice per subgroup. Blood samples (70 μL) were collected alternately at the following time points. At the terminal Day 28, maximum blood volume was collected. Blood was collected from 5 untreated mice and used as blank serum. Collected serum was stored at −80° C. prior to measurement of serum concentrations. Animal were frozen and stored at −80° C. at the endpoint.

| Sample Time | Subgroup A | Subgroup B | Subgroup C | Subgroup D |
|---|---|---|---|---|
| 4 hr | ⁻V | — | — | — |
| Day 1 | — | ⁻NI | — | — |
| Day 2 | — | — | ⁻Ni | — |
| Day 3 | — | — | — | A/ |
| Day 5 | Ai | — | — | — |
| Day 7 | — | Ai | — | — |
| Day 14 | — | — | ⁻q | — |
| Day 21 | — | — | — | Ai |
| Day 28 | T | T | T | T |

Notes = 70 μL blood samples;
T = terminal blood collection (total 12 mice/group) Tail clips of each

### Study Endpoint

[1176] The experiment was terminated Day 28 post grouping. During the experiment, if one of the following conditions occurs, the animals should be euthanized.
[1177] 1) The appearance of abnormal movement or paralysis.
[1178] 2) Body weight loss exceeds 20% from the initial treatment.

[1179] During the entire experiment, animals were monitored every day for their status, including but not limited to visual estimation of food and water consumption.

[1180] Noncompartmental PK parameters of Five Fc fusion proteins were estimated from serum concentration-versus-time data, using Phoenix WinNonlin 8.3, and PK parameters (Cmax, AUC, half-life, C1, Vd) were summarized. PK parameters for each fusion protein were compared.

### Animal Observation and Body Weight Change

[1181] No obvious clinical signs were found during the study, indicating a good tolerance of animals to test articles. The mean body weight and body weight change over time are shown in Table 46 below.

TABLE 46
Body weight change of B-hFcRn mice after administration

| | | | Body Weight (g) | | |
|---|---|---|---|---|---|
| | | | | Day 27 | |
| | | | Before | post | |
| Group | Test articles | Dosages | treatment | grouping | Change (g) |
| G1 | 7933-001 | 10 | 20.0 + 0.3 | 22.4 + 0.3 | +2.4 |
| G2 | 7933-005 | 10 | 20.1 + 0.3 | 22.0 + 0.3 | +1.9 |
| G3 | 7933-006 | 10 | 20.0 + 0.3 | 22.0 + 0.2 | +2.0 |
| G4 | 7933-007 | 10 | 20.0 + 0.3 | 22.0 + 0.3 | +2.0 |
| G5 | 7933-008 | 10 | 20.1 + 0.3 | 21.9 + 0.3 | +1.8 |

a: Mean ± SEM.

### Comparison of PK Among the Five Fc Fusion Proteins

[1182] The averaged concentration-time profiles of five Fe fusion proteins following single-dose administration of 10 mg/kg. The serum concentration of five untreated mice were below the limit of quantitation. Noncompartmental PK parameters of five Fc fusion proteins were estimated from serum concentration-versus-time data, using Phoenix WinNonlin 8.3, and PK parameters were summarized in the following table.

TABLE 47
PK parameters following single-dose of five Fc fusion proteins in B-hFcRn mice

| | | | | | | | AUC_% | | |
|---|---|---|---|---|---|---|---|---|---|
| | Rsq | T½ | Tmax | Cmax | AUCIast | AUCINF | Extrap | Vd | Cl |
| Group | adjusted | (day) | (day) | (ug/mL) | (day*ug/mL) | (day*ug/mL) | (%) | (mL/kg) | (mL/day/kg) |
| G1 7933-001 | 0.889 | 3.887 | 0.170 | 23.249 | 31.826 | 33.092 | 3.825 | 1694.650 | 302.191 |
| G2 7933-005 | 0.998 | 8.740 | 0.170 | 24.627 | 86.531 | 92.152 | 6.100 | 1368.266 | 108.516 |
| G3 7933-006 | 0.820 | 6.925 | 0.170 | 36.251 | 130.725 | 144.298 | 9.406 | 692.335 | 69.301 |
| G4 7933-007 | 0.973 | 7.681 | 0.170 | 25.551 | 127.413 | 139.301 | 8.534 | 795.483 | 71.787 |
| G5 7933-008 | 1.000 | 6.687 | 0.170 | 12.782 | 27.798 | 28.524 | 2.547 | 3382.307 | 350.578 |

Note:
Rsq adjusted < 0.85 group indicates no reference significance;
Tmax: Time of Cmax;
Cmax: Maximum observed concentration, occurring at Tmax;
T½: half-life;
AUCiₐₛₜ: Area Under the Curve from the time of dosing (Dosing_time) to last measurable concentration;
AUCINF: Area Under the Curve from Dosing_time extrapolated to infinity;
Vd: Apparent Volume of Distribution
Cl: Clearance rate;
Rsq_adj: Adjusted R-squared;
AUC_% Extrap: Percentage of AUC due to extrapolation from last to infinity

[1183] A comparison of the half-life of the terminal elimination phase and serum clearance of five fusion proteins was assessed. The half-life of 7933-001, 7933-005, 7933-006, 7933-007, and 7933-008 was 3.887 days, 8.740 days, 6.925 days, 7.681 days, and 6.687 days respectively. The Vd of 7933-001, 7933-005, 7933-006, 7933-007, and 7933-008 was 1694.650 mL/kg, 1368.266 mL/kg, 692.335 mL/kg, 795.483 mL/kg, and 3382.307 mL/kg respectively. The C1 of 7933-001, 7933-005, 7933-006, 7933-007, and 7933-008 was 302.191 mL/day/kg, 108.516 mL/day/kg, 69.301 mL/day/kg, 71.787 mL/day/kg, and 350.578 mL/day/kg respectively.

### Conclusions

[1184] A single 10 mg/kg dose of five Fc fusion proteins administered to mice expressing human FcRn presented no negative effects on animal body weights or clinical signs. Serum pharmacokinetics differed among the fusion proteins, with 7933-001 and 7933-008 demonstrating a 3-fold to 4-fold greater serum clearance compared to 7933-005, 7933-006, and 7933-007.

### Example 21

### Inhibition of Growth Factor-Induced Proliferation

[1185] The assay protocol to assess the inhibitory activity of the various growth factor trap constructs for inhibiting growth factor-induced proliferation in cell culture is depicted in FIG. 23. The summary of the inhibition results is set forth in the table below, and depicted in FIGS. 24A-D.

TABLE 45
Summary of the Inhibitory Activities

| | Proliferation | GF-indued proliferation inhibited by: | | | |
|---|---|---|---|---|---|
| Cells | induced by: | EN2140 | EN2320 | EN2642 | Cetuximab |
| CAL-12T | NRG1β | — | **** | **** | * |
| CAL-12T | EGF | **** | — | **** | **** |
| OE33 | NRG1β | **** | **** | **** | **** |
| OE33 | EGF | **** | *** | **** | **** |
| NCI-H820 | NRG1β | * | **** | **** | *** |
| NCI-H820 | EGF | **** | * | **** | **** |
| HCC-95 | NRG1β | — | * | — | — |
| HCC-95 | EGF | — | — | — | — |
| HCT-116-CRC | NRG1β | — | — | — | — |
| HCT-116-CRC | EGF | — | — | — | — |

*P < 0.05;
***P < 0.001;
P < 0.0001

[1186] FIGS. 24A-D show inhibition of growth factor induced proliferation in varying concentrations of fetal bovine serum for each of the constructs: homodimer/heterodimer mixtures, the homodimer, and heterodimer compared to growth factor alone control and to cetuximab. In general, the heterodimer and heterodimer/homodimer mixture inhibit growth factor induced proliferation, and, with respect to some growth factors are better than cetuximab, and others are comparable to cetuximab. They act in accord with the affinities of the constructs for the growth factors.

[1187] FIGS. 24A-D provide a series of bar graphs that quantify cell proliferation in culture in the presence of various tumor cell lines and treatments with inhibitors: the growth factor trap constructs and Cetuximab, in units of luminescence. Cell proliferation is quantified for each of the following treatments: FIG. 24A depicts growth factor-induced cell proliferation of CAL-12T cells in units of luminescence. Cell proliferation is quantified for each of the following treatments: Untreated, NRG1β only, NRG1β+cetuximab, NRG1β+EN2642, NRG1β+EN2140; and Untreated, EGF only, EGF+cetuximab, EGF+EN2320, EGF+EN2642, EGF+EN2140. Untreated, NRG1β only, NRG1β+cetuximab, NRG1β+EN2642, NRG1β +EN2140; and Untreated, EGF only, EGF+cetuximab, EGF+EN2320, EGF+EN2642, EGF+EN2140. FIG. 24B depicts quantified growth factor-induced cell proliferation of OE33 cells in units of luminescence. Cell proliferation is quantified for the same treatments described in FIG. 24A. FIG. 24C depicts quantified growth factor-induced cell proliferation of NCl-H820 cells in units of luminescence. Cell proliferation is quantified for the same treatments described in FIG. 24A. FIG. 24D depicts quantified growth factor-induced cell proliferation of HCC95 cells in units of luminescence. Cell proliferation is quantified for each of the following treatments: Untreated, NRG1β only NRG1β+cetuximab, NRG1β+EN2642, NRG1β+EN2140.

[1188] The results show that EGF-induced and NRG-induced proliferation of cancer cells is inhibited by the constructs. EN2140 (EGFR/Fc) and EN2320 (HER3/Fc) inhibits EGF- and NRG-induced proliferation, respectively, and the bispecific construct EN2642 inhibits both. A biomarker search indicates that overexpression of amphiregulin corelates with the growth inhibition (CAL12T, OE33).

### Example 22

### Efficacy for Treatment Rheumatoid Arthritis

[1189] The mixture designated EN2642 (mixture of heterodimers/homodimers of HER1-oECD/Fc and HER3-oECD/Fc dimers demonstrated efficacy in a rodent (BSA) model of rheumatoid arthritis. Antigen-induced arthritis was induced as described (Van Den Berg et al., (1985 (American J. Pathology 121:224-234, PMC1888064). The antigen-induced model of rheumatoid arthritis is the most demanding animal model because of the rapid onset of disease.

[1190] In accord with this model, the animals (6 per group) mice were injected subcutaneously with mBSA in CFA, an inflammatory agent, at day −21, followed at day zero (0) by intra-articular injection of mBSA, and subsequent daily intra-peritoneal injection of the EN2642 (100 μg 300 μg and 1 mg) or of control (phosphate buffered saline) for seven days, during which there were daily knee measurements. The knee joints were harvested on day 7 for histology.

[1191] The results are shown in FIG. 14, which shows the knee thickness from day 0 through day 2, for the three dosages and compared to control. A statistical difference was observed in knee swelling at Day 1 and Day 2 following treatment with EN-2642 vs. control (phosphate buffered saline) as a function of dose.

### Example 23

### PK Study of the Fc Fusion Proteins in B-hFcRn Mice

[1192] The serum pharmacokinetics of 5 different ligand traps were compared in 6-8-week-old female C57BL/6 mice engineered to express human FcRn (B-hFcRn mice-Biocytogen #110001). Mice were randomized to 5 groups (G1-G5, with N=12/group), and administered the oligo-trap ligand trap mixtures (10 mg/kg; >95% purity) by single tail vein injection (see Table below). Blood samples for serum were collected from subgroups of mice (N=3/timepoint) at 4 and 24 hrs, and 2, 3-, 5-, 7- and 14-days post-injection. Serum concentrations were measured by ELISA.

| Group | Test Construct Mixture |
|---|---|
| 1 | 7933_001 (parental) |
| 2 | 7933_005 (LS) |
| 3 | 7933_006 (YTE) |
| 4 | 7933_007 (YTE + LS) |
| 5 | 7933_008 (Full-length Hinge + 5aa) |

### Results

[1193] Serum concentration-time profiles for each of the ligand traps are plotted in FIG. 15. Ligand traps with the half-life extending replacements (see discussion and sequences in the Examples above), LS, (Group 2), YTE (Group 3), or YTE+LS (Group 4) Fc-mutations demonstrated prolonged systemic exposure compared to ligand traps with the parental constructs (Groups 1 and 5).

[1194] Pharmacokinetic analysis of the 14-day data indicates a 2.3-fold to 3.5-fold increase in serum area-under-the-curve (AUC₀₋ₗₐₛₜ) for the constructs with the half-life extending Fc-mutations (Groups 2-4) compared to the constructs in which the Fc's do not include these amino acid replacements (Groups 1 and 5).

| | AUC₀₋ₗₐₛₜ | Increase vs |
|---|---|---|
| Group | (day*ug/mL) | G1 |
| 1 | 31.826 | 1.00 |
| 2 | 74.613 | 2.34 |
| 3 | 111.629 | 3.51 |
| 4 | 104.089 | 3.27 |
| 5 | 25.322 | 0.80 |

### Example 24

### Evaluation of EN-2642 in a Mouse Model of Joint Inflammation Methods

[1195] Acute inflammation was established in mice by injection of methylated BSA into the knee joints as previously described (Topping et al. Front. Immunol., 13 Jun. 2022, Sec. Autoimmune and Autoinflammatory Disorders, doi.org/10.3389/fimmu.2022.892251). C57BL/6 were immunized subcutaneously with methylated bovine serum albumin (mBSA) on day 0. On day 21, both knees were shaved and 100 μg of mBSA was administered via intra-articular injection in the right knee joint. Left knee joints were untreated. From day 21 onwards, mice were treated daily with an IP injection of 0.1, 0.3 or 1 mg of EN2642 (7933-001); 7.25 mg/ml) or PBS vehicle. Knee swelling was monitored daily using digital calipers.

[1196] For IVIS imaging, mice received an intravenous injection of 4 nmol ProSense 750 FAST imaging probe one day after intra-articular injection of mBSA or vehicle. Mice were imaged 20 hours post injection using the IVIS Spectrum (Perkin Elmer, Waltham, Massachusetts, USA) with an excitation wavelength of 745 nm and an emission wavelength of 800 nm. Images were analyzed using Living Image 4.7 software (Perkin Elmer) to obtain the average fluorescence intensities of a circular region of interest encompassing the knee joint.

[1197] Articular nociception was evaluated using a dynamic weight bearing apparatus. Mice were placed in a chamber and allowed to move freely within the apparatus for period of 4 minutes. Software analyzed the weight distribution of each paw and results were expressed as percentage weight ratio of the rear paw over the ipsilateral rear paw.

### Results

[1198] EN2642 treatment resulted in a reduction in knee swelling as early as 1 day post treatment, and the effect persisted over a course of 1 week. Effects were most notable at the 1 mg EN2642 dose. Decreased inflammation in the affected joints was also shown to be dependent on the dose of EN2642, as measured by the IVIS imaging. While there were measurable effects of EN2642 on knee swelling and fluorescence activity, there was no statistical difference in particular nociception as measured by differences in left/right weight ratios.

[1199] Since modifications will be apparent to those of skill in the art, it is intended that this invention be limited only by the scope of the appended claims.

The application's sequence listing, which the Patent Office published only in electronic form, follows.

SEQUENCE LISTING (677 sequences)

SEQ ID NO: 1 - DNA, 5616 bp, Homo sapiens
  misc_feature 1..5616: note = epidermal growth factor receptor (HER1)
  source 1..5616: mol_type = genomic DNA
ccccggcgcagcgcggccgcagcagcctccgccccccgcacggtgtgagcgcccgacgcggccgaggcggccggagtcccgagctagccccggcggccgccgccgcccagaccggacgacaggccacctcgtcggcgtccgcccgagtccccgcctcgccgccaacgccacaaccaccgcgcacggccccctgactccgtccagtattgatcgggagagccggagcgagctcttcggggagcagcgatgcgaccctccgggacggccggggcagcgctcctggcgctgctggctgcgctctgcccggcgagtcgggctctggaggaaaagaaagtttgccaaggcacgagtaacaagctcacgcagttgggcacttttgaagatcattttctcagcctccagaggatgttcaataactgtgaggtggtccttgggaatttggaaattacctatgtgcagaggaattatgatctttccttcttaaagaccatccaggaggtggctggttatgtcctcattgccctcaacacagtggagcgaattcctttggaaaacctgcagatcatcagaggaaatatgtactacgaaaattcctatgccttagcagtcttatctaactatgatgcaaataaaaccggactgaaggagctgcccatgagaaatttacaggaaatcctgcatggcgccgtgcggttcagcaacaaccctgccctgtgcaacgtggagagcatccagtggcgggacatagtcagcagtgactttctcagcaacatgtcgatggacttccagaaccacctgggcagctgccaaaagtgtgatccaagctgtcccaatgggagctgctggggtgcaggagaggagaactgccagaaactgaccaaaatcatctgtgcccagcagtgctccgggcgctgccgtggcaagtcccccagtgactgctgccacaaccagtgtgctgcaggctgcacaggcccccgggagagcgactgcctggtctgccgcaaattccgagacgaagccacgtgcaaggacacctgccccccactcatgctctacaaccccaccacgtaccagatggatgtgaaccccgagggcaaatacagctttggtgccacctgcgtgaagaagtgtccccgtaattatgtggtgacagatcacggctcgtgcgtccgagcctgtggggccgacagctatgagatggaggaagacggcgtccgcaagtgtaagaagtgcgaagggccttgccgcaaagtgtgtaacggaataggtattggtgaatttaaagactcactctccataaatgctacgaatattaaacacttcaaaaactgcacctccatcagtggcgatctccacatcctgccggtggcatttaggggtgactccttcacacatactcctcctctggatccacaggaactggatattctgaaaaccgtaaaggaaatcacagggtttttgctgattcaggcttggcctgaaaacaggacggacctccatgcctttgagaacctagaaatcatacgcggcaggaccaagcaacatggtcagttttctcttgcagtcgtcagcctgaacataacatccttgggattacgctccctcaaggagataagtgatggagatgtgataatttcaggaaacaaaaatttgtgctatgcaaatacaataaactggaaaaaactgtttgggacctccggtcagaaaaccaaaattataagcaacagaggtgaaaacagctgcaaggccacaggccaggtctgccatgccttgtgctcccccgagggctgctggggcccggagcccagggactgcgtctcttgccggaatgtcagccgaggcagggaatgcgtggacaagtgcaaccttctggagggtgagccaagggagtttgtggagaactctgagtgcatacagtgccacccagagtgcctgcctcaggccatgaacatcacctgcacaggacggggaccagacaactgtatccagtgtgcccactacattgacggcccccactgcgtcaagacctgcccggcaggagtcatgggagaaaacaacaccctggtctggaagtacgcagacgccggccatgtgtgccacctgtgccatccaaactgcacctacggatgcactgggccaggtcttgaaggctgtccaacgaatgggcctaagatcccgtccatcgccactgggatggtgggggccctcctcttgctgctggtggtggccctggggatcggcctcttcatgcgaaggcgccacatcgttcggaagcgcacgctgcggaggctgctgcaggagagggagcttgtggagcctcttacacccagtggagaagctcccaaccaagctctcttgaggatcttgaaggaaactgaattcaaaaagatcaaagtgctgggctccggtgcgttcggcacggtgtataagggactctggatcccagaaggtgagaaagttaaaattcccgtcgctatcaaggaattaagagaagcaacatctccgaaagccaacaaggaaatcctcgatgaagcctacgtgatggccagcgtggacaacccccacgtgtgccgcctgctgggcatctgcctcacctccaccgtgcagctcatcacgcagctcatgcccttcggctgcctcctggactatgtccgggaacacaaagacaatattggctcccagtacctgctcaactggtgtgtgcagatcgcaaagggcatgaactacttggaggaccgtcgcttggtgcaccgcgacctggcagccaggaacgtactggtgaaaacaccgcagcatgtcaagatcacagattttgggctggccaaactgctgggtgcggaagagaaagaataccatgcagaaggaggcaaagtgcctatcaagtggatggcattggaatcaattttacacagaatctatacccaccagagtgatgtctggagctacggggtgaccgtttgggagttgatgacctttggatccaagccatatgacggaatccctgccagcgagatctcctccatcctggagaaaggagaacgcctccctcagccacccatatgtaccatcgatgtctacatgatcatggtcaagtgctggatgatagacgcagatagtcgcccaaagttccgtgagttgatcatcgaattctccaaaatggcccgagacccccagcgctaccttgtcattcagggggatgaaagaatgcatttgccaagtcctacagactccaacttctaccgtgccctgatggatgaagaagacatggacgacgtggtggatgccgacgagtacctcatcccacagcagggcttcttcagcagcccctccacgtcacggactcccctcctgagctctctgagtgcaaccagcaacaattccaccgtggcttgcattgatagaaatgggctgcaaagctgtcccatcaaggaagacagcttcttgcagcgatacagctcagaccccacaggcgccttgactgaggacagcatagacgacaccttcctcccagtgcctgaatacataaaccagtccgttcccaaaaggcccgctggctctgtgcagaatcctgtctatcacaatcagcctctgaaccccgcgcccagcagagacccacactaccaggacccccacagcactgcagtgggcaaccccgagtatctcaacactgtccagcccacctgtgtcaacagcacattcgacagccctgcccactgggcccagaaaggcagccaccaaattagcctggacaaccctgactaccagcaggacttctttcccaaggaagccaagccaaatggcatctttaagggctccacagctgaaaatgcagaatacctaagggtcgcgccacaaagcagtgaatttattggagcatgaccacggaggatagtatgagccctaaaaatccagactctttcgatacccaggaccaagccacagcaggtcctccatcccaacagccatgcccgcattagctcttagacccacagactggttttgcaacgtttacaccgactagccaggaagtacttccacctcgggcacattttgggaagttgcattcctttgtcttcaaactgtgaagcatttacagaaacgcatccagcaagaatattgtccctttgagcagaaatttatctttcaaagaggtatatttgaaaaaaaaaaaaagtatatgtgaggatttttattgattggggatcttggagtttttcattgtcgctattgatttttacttcaatgggctcttccaacaaggaagaagcttgctggtagcacttgctaccctgagttcatccaggcccaactgtgagcaaggagcacaagccacaagtcttccagaggatgcttgattccagtggttctgcttcaaggcttccactgcaaaacactaaagatccaagaaggccttcatggccccagcaggccggatcggtactgtatcaagtcatggcaggtacagtaggataagccactctgtcccttcctgggcaaagaagaaacggaggggatggaattcttccttagacttacttttgtaaaaatgtccccacggtacttactccccactgatggaccagtggtttccagtcatgagcgttagactgacttgtttgtcttccattccattgttttgaaactcagtatgctgcccctgtcttgctgtcatgaaatcagcaagagaggatgacacatcaaataataactcggattccagcccacattggattcatcagcatttggaccaatagcccacagctgagaatgtggaatacctaaggatagcaccgcttttgttctcgcaaaaacgtatctcctaatttgaggctcagatgaaatgcatcaggtcctttggggcatagatcagaagactacaaaaatgaagctgctctgaaatctcctttagccatcaccccaaccccccaaaattagtttgtgttacttatggaagatagttttctccttttacttcacttcaaaagctttttactcaaagagtatatgttccctccaggtcagctgcccccaaaccccctccttacgctttgtcacacaaaaagtgtctctgccttgagtcatctattcaagcacttacagctctggccacaacagggcattttacaggtgcgaatgacagtagcattatgagtagtgtggaattcaggtagtaaatatgaaactagggtttgaaattgataatgctttcacaacatttgcagatgttttagaaggaaaaaagttccttcctaaaataatttctctacaattggaagattggaagattcagctagttaggagcccaccttttttcctaatctgtgtgtgccctgtaacctgactggttaacagcagtcctttgtaaacagtgttttaaactctcctagtcaatatccaccccatccaatttatcaaggaagaaatggttcagaaaatattttcagcctacagttatgttcagtcacacacacatacaaaatgttccttttgcttttaaagtaatttttgactcccagatcagtcagagcccctacagcattgttaagaaagtatttgatttttgtctcaatgaaaataaaactatattcatttccactctaaaaaaaaaaaaaaaaa

SEQ ID NO: 2 - protein, 1210 aa, Homo sapiens [sequence omitted]

SEQ ID NO: 3 - DNA, 4530 bp, Homo sapiens
  misc_feature 1..4530: note = HER2 receptor
  source 1..4530: mol_type = genomic DNA
aattctcgagctcgtcgaccggtcgacgagctcgagggtcgacgagctcgagggcgcgcgcccggcccccacccctcgcagcaccccgcgccccgcgccctcccagccgggtccagccggagccatggggccggagccgcagtgagcaccatggagctggcggccttgtgccgctgggggctcctcctcgccctcttgccccccggagccgcgagcacccaagtgtgcaccggcacagacatgaagctgcggctccctgccagtcccgagacccacctggacatgctccgccacctctaccagggctgccaggtggtgcagggaaacctggaactcacctacctgcccaccaatgccagcctgtccttcctgcaggatatccaggaggtgcagggctacgtgctcatcgctcacaaccaagtgaggcaggtcccactgcagaggctgcggattgtgcgaggcacccagctctttgaggacaactatgccctggccgtgctagacaatggagacccgctgaacaataccacccctgtcacaggggcctccccaggaggcctgcgggagctgcagcttcgaagcctcacagagatcttgaaaggaggggtcttgatccagcggaacccccagctctgctaccaggacacgattttgtggaaggacatcttccacaagaacaaccagctggctctcacactgatagacaccaaccgctctcgggcctgccacccctgttctccgatgtgtaagggctcccgctgctggggagagagttctgaggattgtcagagcctgacgcgcactgtctgtgccggtggctgtgcccgctgcaaggggccactgcccactgactgctgccatgagcagtgtgctgccggctgcacgggccccaagcactctgactgcctggcctgcctccacttcaaccacagtggcatctgtgagctgcactgcccagccctggtcacctacaacacagacacgtttgagtccatgcccaatcccgagggccggtatacattcggcgccagctgtgtgactgcctgtccctacaactacctttctacggacgtgggatcctgcaccctcgtctgccccctgcacaaccaagaggtgacagcagaggatggaacacagcggtgtgagaagtgcagcaagccctgtgcccgagtgtgctatggtctgggcatggagcacttgcgagaggtgagggcagttaccagtgccaatatccaggagtttgctggctgcaagaagatctttgggagcctggcatttctgccggagagctttgatggggacccagcctccaacactgccccgctccagccagagcagctccaagtgtttgagactctggaagagatcacaggttacctatacatctcagcatggccggacagcctgcctgacctcagcgtcttccagaacctgcaagtaatccggggacgaattctgcacaatggcgcctactcgctgaccctgcaagggctgggcatcagctggctggggctgcgctcactgagggaactgggcagtggactggccctcatccaccataacacccacctctgcttcgtgcacacggtgccctgggaccagctctttcggaacccgcaccaagctctgctccacactgccaaccggccagaggacgagtgtgtgggcgagggcctggcctgccaccagctgtgcgcccgagggcactgctggggtccagggcccacccagtgtgtcaactgcagccagttccttcggggccaggagtgcgtggaggaatgccgagtactgcaggggctccccagggagtatgtgaatgccaggcactgtttgccgtgccaccctgagtgtcagccccagaatggctcagtgacctgttttggaccggaggctgaccagtgtgtggcctgtgcccactataaggaccctcccttctgcgtggcccgctgccccagcggtgtgaaacctgacctctcctacatgcccatctggaagtttccagatgaggagggcgcatgccagccttgccccatcaactgcacccactcctgtgtggacctggatgacaagggctgccccgccgagcagagagccagccctctgacgtccatcgtctctgcggtggttggcattctgctggtcgtggtcttgggggtggtctttgggatcctcatcaagcgacggcagcagaagatccggaagtacacgatgcggagactgctgcaggaaacggagctggtggagccgctgacacctagcggagcgatgcccaaccaggcgcagatgcggatcctgaaagagacggagctgaggaaggtgaaggtgcttggatctggcgcttttggcacagtctacaagggcatctggatccctgatggggagaatgtgaaaattccagtggccatcaaagtgttgagggaaaacacatcccccaaagccaacaaagaaatcttagacgaagcatacgtgatggctggtgtgggctccccatatgtctcccgccttctgggcatctgcctgacatccacggtgcagctggtgacacagcttatgccctatggctgcctcttagaccatgtccgggaaaaccgcggacgcctgggctcccaggacctgctgaactggtgtatgcagattgccaaggggatgagctacctggaggatgtgcggctcgtacacagggacttggccgctcggaacgtgctggtcaagagtcccaaccatgtcaaaattacagacttcgggctggctcggctgctggacattgacgagacagagtaccatgcagatgggggcaaggtgcccatcaagtggatggcgctggagtccattctccgccggcggttcacccaccagagtgatgtgtggagttatggtgtgactgtgtgggagctgatgacttttggggccaaaccttacgatgggatcccagcccgggagatccctgacctgctggaaaagggggagcggctgccccagccccccatctgcaccattgatgtctacatgatcatggtcaaatgttggatgattgactctgaatgtcggccaagattccgggagttggtgtctgaattctcccgcatggccagggacccccagcgctttgtggtcatccagaatgaggacttgggcccagccagtcccttggacagcaccttctaccgctcactgctggaggacgatgacatgggggacctggtggatgctgaggagtatctggtaccccagcagggcttcttctgtccagaccctgccccgggcgctgggggcatggtccaccacaggcaccgcagctcatctaccaggagtggcggtggggacctgacactagggctggagccctctgaagaggaggcccccaggtctccactggcaccctccgaaggggctggctccgatgtatttgatggtgacctgggaatgggggcagccaaggggctgcaaagcctccccacacatgaccccagccctctacagcggtacagtgaggaccccacagtacccctgccctctgagactgatggctacgttgcccccctgacctgcagcccccagcctgaatatgtgaaccagccagatgttcggccccagcccccttcgccccgagagggccctctgcctgctgcccgacctgctggtgccactctggaaagggccaagactctctccccagggaagaatggggtcgtcaaagacgtttttgcctttgggggtgccgtggagaaccccgagtacttgacaccccagggaggagctgcccctcagccccaccctcctcctgccttcagcccagccttcgacaacctctattactgggaccaggacccaccagagcggggggctccacccagcaccttcaaagggacacctacggcagagaacccagagtacctgggtctggacgtgccagtgtgaaccagaaggccaagtccgcagaagccctgatgtgtcctcagggagcagggaaggcctgacttctgctggcatcaagaggtgggagggccctccgaccacttccaggggaacctgccatgccaggaacctgtcctaaggaaccttccttcctgcttgagttcccagatggctggaaggggtccagcctcgttggaagaggaacagcactggggagtctttgtggattctgaggccctgcccaatgagactctagggtccagtggatgccacagcccagcttggccctttccttccagatcctgggtactgaaagccttagggaagctggcctgagaggggaagcggccctaagggagtgtctaagaacaaaagcgacccattcagagactgtccctgaaacctagtactgccccccatgaggaaggaacagcaatggtgtcagtatccaggctttgtacagagtgcttttctgtttagtttttactttttttgttttgtttttttaaagacgaaataaagacccaggggagaatgggtgttgtatggggaggcaagtgtggggggtccttctccacacccactttgtccatttgcaaatatattttggaaaac

SEQ ID NO: 4 - protein, 1255 aa, Homo sapiens
  REGION 1..1255: note = HER2 receptor
MELAALCRWGLLLALLPPGAASTQVCTGTDMKLRLPASPETHLDMLRHLYQGCQVVQGNLELTYLPTNASLSFLQDIQEVQGYVLIAHNQVRQVPLQRLRIVRGTQLFEDNYALAVLDNGDPLNNTTPVTGASPGGLRELQLRSLTEILKGGVLIQRNPQLCYQDTILWKDIFHKNNQLALTLIDTNRSRACHPCSPMCKGSRCWGESSEDCQSLTRTVCAGGCARCKGPLPTDCCHEQCAAGCTGPKHSDCLACLHFNHSGICELHCPALVTYNTDTFESMPNPEGRYTFGASCVTACPYNYLSTDVGSCTLVCPLHNQEVTAEDGTQRCEKCSKPCARVCYGLGMEHLREVRAVTSANIQEFAGCKKIFGSLAFLPESFDGDPASNTAPLQPEQLQVFETLEEITGYLYISAWPDSLPDLSVFQNLQVIRGRILHNGAYSLTLQGLGISWLGLRSLRELGSGLALIHHNTHLCFVHTVPWDQLFRNPHQALLHTANRPEDECVGEGLACHQLCARGHCWGPGPTQCVNCSQFLRGQECVEECRVLQGLPREYVNARHCLPCHPECQPQNGSVTCFGPEADQCVACAHYKDPPFCVARCPSGVKPDLSYMPIWKFPDEEGACQPCPINCTHSCVDLDDKGCPAEQRASPLTSIVSAVVGILLVVVLGVVFGILIKRRQQKIRKYTMRRLLQETELVEPLTPSGAMPNQAQMRILKETELRKVKVLGSGAFGTVYKGIWIPDGENVKIPVAIKVLRENTSPKANKEILDEAYVMAGVGSPYVSRLLGICLTSTVQLVTQLMPYGCLLDHVRENRGRLGSQDLLNWCMQIAKGMSYLEDVRLVHRDLAARNVLVKSPNHVKITDFGLARLLDIDETEYHADGGKVPIKWMALESILRRRFTHQSDVWSYGVTVWELMTFGAKPYDGIPAREIPDLLEKGERLPQPPICTIDVYMIMVKCWMIDSECRPRFRELVSEFSRMARDPQRFVVIQNEDLGPASPLDSTFYRSLLEDDDMGDLVDAEEYLVPQQGFFCPDPAPGAGGMVHHRHRSSSTRSGGGDLTLGLEPSEEEAPRSPLAPSEGAGSDVFDGDLGMGAAKGLQSLPTHDPSPLQRYSEDPTVPLPSETDGYVAPLTCSPQPEYVNQPDVRPQPPSPREGPLPAARPAGATLERAKTLSPGKNGVVKDVFAFGGAVENPEYLTPQGGAAPQPHPPPAFSPAFDNLYYWDQDPPERGAPPSTFKGTPTAENPEYLGLDVPV

SEQ ID NO: 5 - DNA, 5511 bp, Homo sapiens
  misc_feature 1..5511: note = HER3 receptor
  source 1..5511: mol_type = genomic DNA
acacacacacacccctcccctgccatccctccccggactccggctccggctccgattgcaatttgcaacctccgctgccgtcgccgcagcagccaccaattcgccagcggttcaggtggctcttgcctcgatgtcctagcctaggggcccccgggccggacttggctgggctcccttcaccctctgcggagtcatgagggcgaacgacgctctgcaggtgctgggcttgcttttcagcctggcccggggctccgaggtgggcaactctcaggcagtgtgtcctgggactctgaatggcctgagtgtgaccggcgatgctgagaaccaataccagacactgtacaagctctacgagaggtgtgaggtggtgatggggaaccttgagattgtgctcacgggacacaatgccgacctctccttcctgcagtggattcgagaagtgacaggctatgtcctcgtggccatgaatgaattctctactctaccattgcccaacctccgcgtggtgcgagggacccaggtctacgatgggaagtttgccatcttcgtcatgttgaactataacaccaactccagccacgctctgcgccagctccgcttgactcagctcaccgagattctgtcagggggtgtttatattgagaagaacgataagctttgtcacatggacacaattgactggagggacatcgtgagggaccgagatgctgagatagtggtgaaggacaatggcagaagctgtcccccctgtcatgaggtttgcaaggggcgatgctggggtcctggatcagaagactgccagacattgaccaagaccatctgtgctcctcagtgtaatggtcactgctttgggcccaaccccaaccagtgctgccatgatgagtgtgccgggggctgctcaggccctcaggacacagactgctttgcctgccggcacttcaatgacagtggagcctgtgtacctcgctgtccacagcctcttgtctacaacaagctaactttccagctggaacccaatccccacaccaagtatcagtatggaggagtttgtgtagccagctgtccccataactttgtggtggatcaaacatcctgtgtcagggcctgtcctcctgacaagatggaagtagataaaaatgggctcaagatgtgtgagccttgtgggggactatgtcccaaagcctgtgagggaacaggctctgggagccgcttccagactgtggactcgagcaacattgatggatttgtgaactgcaccaagatcctgggcaacctggactttctgatcaccggcctcaatggagacccctggcacaagatccctgccctggacccagagaagctcaatgtcttccggacagtacgggagatcacaggttacctgaacatccagtcctggccgccccacatgcacaacttcagtgttttttccaatttgacaaccattggaggcagaagcctctacaaccggggcttctcattgttgatcatgaagaacttgaatgtcacatctctgggcttccgatccctgaaggaaattagtgctgggcgtatctatataagtgccaataggcagctctgctaccaccactctttgaactggaccaaggtgcttcgggggcctacggaagagcgactagacatcaagcataatcggccgcgcagagactgcgtggcagagggcaaagtgtgtgacccactgtgctcctctgggggatgctggggcccaggccctggtcagtgcttgtcctgtcgaaattatagccgaggaggtgtctgtgtgacccactgcaactttctgaatggggagcctcgagaatttgcccatgaggccgaatgcttctcctgccacccggaatgccaacccatggagggcactgccacatgcaatggctcgggctctgatacttgtgctcaatgtgcccattttcgagatgggccccactgtgtgagcagctgcccccatggagtcctaggtgccaagggcccaatctacaagtacccagatgttcagaatgaatgtcggccctgccatgagaactgcacccaggggtgtaaaggaccagagcttcaagactgtttaggacaaacactggtgctgatcggcaaaacccatctgacaatggctttgacagtgatagcaggattggtagtgattttcatgatgctgggcggcacttttctctactggcgtgggcgccggattcagaataaaagggctatgaggcgatacttggaacggggtgagagcatagagcctctggaccccagtgagaaggctaacaaagtcttggccagaatcttcaaagagacagagctaaggaagcttaaagtgcttggctcgggtgtctttggaactgtgcacaaaggagtgtggatccctgagggtgaatcaatcaagattccagtctgcattaaagtcattgaggacaagagtggacggcagagttttcaagctgtgacagatcatatgctggccattggcagcctggaccatgcccacattgtaaggctgctgggactatgcccagggtcatctctgcagcttgtcactcaatatttgcctctgggttctctgctggatcatgtgagacaacaccggggggcactggggccacagctgctgctcaactggggagtacaaattgccaagggaatgtactaccttgaggaacatggtatggtgcatagaaacctggctgcccgaaacgtgctactcaagtcacccagtcaggttcaggtggcagattttggtgtggctgacctgctgcctcctgatgataagcagctgctatacagtgaggccaagactccaattaagtggatggcccttgagagtatccactttgggaaatacacacaccagagtgatgtctggagctatggtgtgacagtttgggagttgatgaccttcggggcagagccctatgcagggctacgattggctgaagtaccagacctgctagagaagggggagcggttggcacagccccagatctgcacaattgatgtctacatggtgatggtcaagtgttggatgattgatgagaacattcgcccaacctttaaagaactagccaatgagttcaccaggatggcccgagacccaccacggtatctggtcataaagagagagagtgggcctggaatagcccctgggccagagccccatggtctgacaaacaagaagctagaggaagtagagctggagccagaactagacctagacctagacttggaagcagaggaggacaacctggcaaccaccacactgggctccgccctcagcctaccagttggaacacttaatcggccacgtgggagccagagccttttaagtccatcatctggatacatgcccatgaaccagggtaatcttggggagtcttgccaggagtctgcagtttctgggagcagtgaacggtgcccccgtccagtctctctacacccaatgccacggggatgcctggcatcagagtcatcagaggggcatgtaacaggctctgaggctgagctccaggagaaagtgtcaatgtgtaggagccggagcaggagccggagcccacggccacgcggagatagcgcctaccattcccagcgccacagtctgctgactcctgttaccccactctccccacccgggttagaggaagaggatgtcaacggttatgtcatgccagatacacacctcaaaggtactccctcctcccgggaaggcaccctttcttcagtgggtctcagttctgtcctgggtactgaagaagaagatgaagatgaggagtatgaatacatgaaccggaggagaaggcacagtccacctcatccccctaggccaagttcccttgaggagctgggttatgagtacatggatgtggggtcagacctcagtgcctctctgggcagcacacagagttgcccactccaccctgtacccatcatgcccactgcaggcacaactccagatgaagactatgaatatatgaatcggcaacgagatggaggtggtcctgggggtgattatgcagccatgggggcctgcccagcatctgagcaagggtatgaagagatgagagcttttcaggggcctggacatcaggccccccatgtccattatgcccgcctaaaaactctacgtagcttagaggctacagactctgcctttgataaccctgattactggcatagcaggcttttccccaaggctaatgcccagagaacgtaactcctgctccctgtggcactcagggagcatttaatggcagctagtgcctttagagggtaccgtcttctccctattccctctctctcccaggtcccagccccttttccccagtcccagacaattccattcaatctttggaggcttttaaacattttgacacaaaattcttatggtatgtagccagctgtgcactttcttctctttcccaaccccaggaaaggttttccttattttgtgtgctttcccagtcccattcctcagcttcttcacaggcactcctggagatatgaaggattactctccatatcccttcctctcaggctcttgactacttggaactaggctcttatgtgtgcctttgtttcccatcagactgtcaagaagaggaaagggaggaaacctagcagaggaaagtgtaattttggtttatgactcttaaccccctagaaagacagaagcttaaaatctgtgaagaaagaggttaggagtagatattgattactatcataattcagcacttaactatgagccaggcatcatactaaacttcacctacattatctcacttagtcctttatcatccttaaaacaattctgtgacatacatattatctcattttacacaaagggaagtcgggcatggtggctcatgcctgtaatctcagcactttgggaggctgaggcagaaggattacctgaggcaaggagtttgagaccagcttagccaacatagtaagacccccatctctttaaaaaaaaaaaaaaaaaaaaaaaaaaaactttagaactgggtgcagtggctcatgcctgtaatcccagccagcactttgggaggctgagatgggaagatcacttgagcccagaattagagataagcctatggaaacatagcaagacactgtctctacaggggaaaaaaaaaaaagaaactgagccttaaagagatgaaataaattaagcagtagatccaggatgcaaaatcctcccaattcctgtgcatgtgctcttattgtaaggtgccaagaaaaactgatttaagttacagcccttgtttaaggggcactgtttcttgtttttgcactgaatcaagtctaaccccaacagccacatcctcctatacctagacatctcatctcaggaagtggtggtgggggtagtcagaaggaaaaataactggacatctttgtgtaaaccataatccacatgtgccgtaaatgatcttcactccttatccgagggcaaattcacaaggatccccaagatccacttttagaagccattctcatcca

SEQ ID NO: 6 - protein, 1342 aa, Homo sapiens
  REGION 1..1342: note = HER3 receptor
MRANDALQVLGLLFSLARGSEVGNSQAVCPGTLNGLSVTGDAENQYQTLYKLYERCEVVMGNLEIVLTGHNADLSFLQWIREVTGYVLVAMNEFSTLPLPNLRVVRGTQVYDGKFAIFVMLNYNTNSSHALRQLRLTQLTEILSGGVYIEKNDKLCHMDTIDWRDIVRDRDAEIVVKDNGRSCPPCHEVCKGRCWGPGSEDCQTLTKTICAPQCNGHCFGPNPNQCCHDECAGGCSGPQDTDCFACRHFNDSGACVPRCPQPLVYNKLTFQLEPNPHTKYQYGGVCVASCPHNFVVDQTSCVRACPPDKMEVDKNGLKMCEPCGGLCPKACEGTGSGSRFQTVDSSNIDGFVNCTKILGNLDFLITGLNGDPWHKIPALDPEKLNVFRTVREITGYLNIQSWPPHMHNFSVFSNLTTIGGRSLYNRGFSLLIMKNLNVTSLGFRSLKEISAGRIYISANRQLCYHHSLNWTKVLRGPTEERLDIKHNRPRRDCVAEGKVCDPLCSSGGCWGPGPGQCLSCRNYSRGGVCVTHCNFLNGEPREFAHEAECFSCHPECQPMGGTATCNGSGSDTCAQCAHFRDGPHCVSSCPHGVLGAKGPIYKYPDVQNECRPCHENCTQGCKGPELQDCLGQTLVLIGKTHLTMALTVIAGLVVIFMMLGGTFLYWRGRRIQNKRAMRRYLERGESIEPLDPSEKANKVLARIFKETELRKLKVLGSGVFGTVHKGVWIPEGESIKIPVCIKVIEDKSGRQSFQAVTDHMLAIGSLDHAHIVRLLGLCPGSSLQLVTQYLPLGSLLDHVRQHRGALGPQLLLNWGVQIAKGMYYLEEHGMVHRNLAARNVLLKSPSQVQVADFGVADLLPPDDKQLLYSEAKTPIKWMALESIHFGKYTHQSDVWSYGVTVWELMTFGAEPYAGLRLAEVPDLLEKGERLAQPQICTIDVYMVMVKCWMIDENIRPTFKELANEFTRMARDPPRYLVIKRESGPGIAPGPEPHGLTNKKLEEVELEPELDLDLDLEAEEDNLATTTLGSALSLPVGTLNRPRGSQSLLSPSSGYMPMNQGNLGGSCQESAVSGSSERCPRPVSLHPMPRGCLASESSEGHVTGSEAELQEKVSMCRSRSRSRSPRPRGDSAYHSQRHSLLTPVTPLSPPGLEEEDVNGYVMPDTHLKGTPSSREGTLSSVGLSSVLGTEEEDEDEEYEYMNRRRRHSPPHPPRPSSLEELGYEYMDVGSDLSASLGSTQSCPLHPVPIMPTAGTTPDEDYEYMNRQRDGGGPGGDYAAMGACPASEQGYEEMRAFQGPGHQAPHVHYARLKTLRSLEATDSAFDNPDYWHSRLFPKANAQRT

SEQ ID NO: 7 - DNA, 5484 bp, Homo sapiens
  misc_feature 1..5484: note = HER4 receptor
  source 1..5484: mol_type = genomic DNA
aattgtcagcacgggatctgagacttccaaaaaatgaagccggcgacaggactttgggtctgggtgagccttctcgtggcggcggggaccgtccagcccagcgattctcagtcagtgtgtgcaggaacggagaataaactgagctctctctctgacctggaacagcagtaccgagccttgcgcaagtactatgaaaactgtgaggttgtcatgggcaacctggagataaccagcattgagcacaaccgggacctctccttcctgcggtctgttcgagaagtcacaggctacgtgttagtggctcttaatcagtttcgttacctgcctctggagaatttacgcattattcgtgggacaaaactttatgaggatcgatatgccttggcaatatttttaaactacagaaaagatggaaactttggacttcaagaacttggattaaagaacttgacagaaatcctaaatggtggagtctatgtagaccagaacaaattcctttgttatgcagacaccattcattggcaagatattgttcggaacccatggccttccaacttgactcttgtgtcaacaaatggtagttcaggatgtggacgttgccataagtcctgtactggccgttgctggggacccacagaaaatcattgccagactttgacaaggacggtgtgtgcagaacaatgtgacggcagatgctacggaccttacgtcagtgactgctgccatcgagaatgtgctggaggctgctcaggacctaaggacacagactgctttgcctgcatgaatttcaatgacagtggagcatgtgttactcagtgtccccaaacctttgtctacaatccaaccacctttcaactggagcacaatttcaatgcaaagtacacatatggagcattctgtgtcaagaaatgtccacataactttgtggtagattccagttcttgtgtgcgtgcctgccctagttccaagatggaagtagaagaaaatgggattaaaatgtgtaaaccttgcactgacatttgcccaaaagcttgtgatggcattggcacaggatcattgatgtcagctcagactgtggattccagtaacattgacaaattcataaactgtaccaagatcaatgggaatttgatctttctagtcactggtattcatggggacccttacaatgcaattgaagccatagacccagagaaactgaacgtctttcggacagtcagagagataacaggtttcctgaacatacagtcatggccaccaaacatgactgacttcagtgttttttctaacctggtgaccattggtggaagagtactctatagtggcctgtccttgcttatcctcaagcaacagggcatcacctctctacagttccagtccctgaaggaaatcagcgcaggaaacatctatattactgacaacagcaacctgtgttattatcataccattaactggacaacactcttcagcacaatcaaccagagaatagtaatccgggacaacagaaaagctgaaaattgtactgctgaaggaatggtgtgcaaccatctgtgttccagtgatggctgttggggacctgggccagaccaatgtctgtcgtgtcgccgcttcagtagaggaaggatctgcatagagtcttgtaacctctatgatggtgaatttcgggagtttgagaatggctccatctgtgtggagtgtgacccccagtgtgagaagatggaagatggcctcctcacatgccatggaccgggtcctgacaactgtacaaagtgctctcattttaaagatggcccaaactgtgtggaaaaatgtccagatggcttacagggggcaaacagtttcattttcaagtatgctgatccagatcgggagtgccacccatgccatccaaactgcacccaagggtgtaacggtcccactagtcatgactgcatttactacccatggacgggccattccactttaccacaacatgctagaactcccctgattgcagctggagtaattggtgggctcttcattctggtcattgtgggtctgacatttgctgtttatgttagaaggaagagcatcaaaaagaaaagagccttgagaagattcttggaaacagagttggtggaaccattaactcccagtggcacagcacccaatcaagctcaacttcgtattttgaaagaaactgagctgaagagggtaaaagtccttggctcaggtgcttttggaacggtttataaaggtatttgggtacctgaaggagaaactgtgaagattcctgtggctattaagattcttaatgagacaactggtcccaaggcaaatgtggagttcatggatgaagctctgatcatggcaagtatggatcatccacacctagtccggttgctgggtgtgtgtctgagcccaaccatccagctggttactcaacttatgccccatggctgcctgttggagtatgtccacgagcacaaggataacattggatcacaactgctgcttaactggtgtgtccagatagctaagggaatgatgtacctggaagaaagacgactcgttcatcgggatttggcagcccgtaatgtcttagtgaaatctccaaaccatgtgaaaatcacagattttgggctagccagactcttggaaggagatgaaaaagagtacaatgctgatggaggaaagatgccaattaaatggatggctctggagtgtatacattacaggaaattcacccatcagagtgacgtttggagctatggagttactatatgggaactgatgacctttggaggaaaaccctatgatggaattccaacgcgagaaatccctgatttattagagaaaggagaacgtttgcctcagcctcccatctgcactattgacgtttacatggtcatggtcaaatgttggatgattgatgctgacagtagacctaaatttaaggaactggctgctgagttttcaaggatggctcgagaccctcaaagatacctagttattcagggtgatgatcgtatgaagcttcccagtccaaatgacagcaagttctttcagaatctcttggatgaagaggatttggaagatatgatggatgctgaggagtacttggtccctcaggctttcaacatcccacctcccatctatacttccagagcaagaattgactcgaataggagtgaaattggacacagccctcctcctgcctacacccccatgtcaggaaaccagtttgtataccgagatggaggttttgctgctgaacaaggagtgtctgtgccctacagagccccaactagcacaattccagaagctcctgtggcacagggtgctactgctgagatttttgatgactcctgctgtaatggcaccctacgcaagccagtggcaccccatgtccaagaggacagtagcacccagaggtacagtgctgaccccaccgtgtttgccccagaacggagcccacgaggagagctggatgaggaaggttacatgactcctatgcgagacaaacccaaacaagaatacctgaatccagtggaggagaacccttttgtttctcggagaaaaaatggagaccttcaagcattggataatcccgaatatcacaatgcatccaatggtccacccaaggccgaggatgagtatgtgaatgagccactgtacctcaacacctttgccaacaccttgggaaaagctgagtacctgaagaacaacatactgtcaatgccagagaaggccaagaaagcgtttgacaaccctgactactggaaccacagcctgccacctcggagcacccttcagcacccagactacctgcaggagtacagcacaaaatatttttataaacagaatgggcggatccggcctattgtggcagagaatcctgaatacctctctgagttctccctgaagccaggcactgtgctgccgcctccaccttacagacaccggaatactgtggtgtaagctcagttgtggttttttaggtggagagacacacctgctccaatttccccacccccctctctttctctggtggtcttccttctaccccaaggccagtagttttgacacttcccagtggaagatacagagatgcaatgatagttatgtgcttacctaacttgaacattagagggaaagactgaaagagaaagataggaggaaccacaatgtttcttcatttctctgcatgggttggtcaggagaatgaaacagctagagaaggaccagaaaatgtaaggcaatgctgcctactatcaaactagctgtcactttttttctttttctttttctttctttgtttctttcttcctcttctttttttttttttttttaaagcagatggttgaaacacccatgctatctgttcctatctgcaggaactgatgtgtgcatatttagcatccctggaaatcataataaagtttccattagaacaaaagaataacattttctataacatatgatagtgtctgaaattgagaatccagtttctttccccagcagtttctgtcctagcaagtaagaatggccaactcaactttcataatttaaaaatctccattaaagttataactagtaattatgttttcaacactttttggtttttttcattttgttttgctctgaccgattcctttatatttgctcccctatttttggctttaatttctaattgcaaagatgtttacatcaaagcttcttcacagaatttaagcaagaaatattttaatatagtgaaatggccactactttaagtatacaatctttaaaataagaaagggaggctaatatttttcatgctatcaaattatcttcaccctcatcctttacatttttcaacatttttttttctccataaatgacactacttgataggccgttggttgtctgaagagtagaagggaaactaagagacagttctctgtggttcaggaaaactactgatactttcaggggtggcccaatgagggaatccattgaactggaagaaacacactggattgggtatgtctacctggcagatactcagaaatgtagtttgcacttaagctgtaattttatttgttctttttctgaactccattttggattttgaatcaagcaatatggaagcaaccagcaaattaactaatttaagtacatttttaaaaaaagagctaagataaagactgtggaaatgccaaaccaagcaaattaggaaccttgcaacggtatccagggactatgatgagaggccagcacattatcttcatatgtcacctttgctacgcaaggaaatttgttcagttcgtatacttcgtaagaaggaatgcgagtaaggattggcttgaattccatggaatttctagtatgagactatttatatgaagtagaaggtaactctttgcacataaattggtataataaaaagaaaaacacaaacattcaaagcttagggataggtccttgggtcaaaagttgtaaataaatgtgaaacatcttctc

SEQ ID NO: 8 - protein, 1308 aa, Homo sapiens
  REGION 1..1308: note = HER4 receptor
MKPATGLWVWVSLLVAAGTVQPSDSQSVCAGTENKLSSLSDLEQQYRALRKYYENCEVVMGNLEITSIEHNRDLSFLRSVREVTGYVLVALNQFRYLPLENLRIIRGTKLYEDRYALAIFLNYRKDGNFGLQELGLKNLTEILNGGVYVDQNKFLCYADTIHWQDIVRNPWPSNLTLVSTNGSSGCGRCHKSCTGRCWGPTENHCQTLTRTVCAEQCDGRCYGPYVSDCCHRECAGGCSGPKDTDCFACMNFNDSGACVTQCPQTFVYNPTTFQLEHNFNAKYTYGAFCVKKCPHNFVVDSSSCVRACPSSKMEVEENGIKMCKPCTDICPKACDGIGTGSLMSAQTVDSSNIDKFINCTKINGNLIFLVTGIHGDPYNAIEAIDPEKLNVFRTVREITGFLNIQSWPPNMTDFSVFSNLVTIGGRVLYSGLSLLILKQQGITSLQFQSLKEISAGNIYITDNSNLCYYHTINWTTLFSTINQRIVIRDNRKAENCTAEGMVCNHLCSSDGCWGPGPDQCLSCRRFSRGRICIESCNLYDGEFREFENGSICVECDPQCEKMEDGLLTCHGPGPDNCTKCSHFKDGPNCVEKCPDGLQGANSFIFKYADPDRECHPCHPNCTQGCNGPTSHDCIYYPWTGHSTLPQHARTPLIAAGVIGGLFILVIVGLTFAVYVRRKSIKKKRALRRFLETELVEPLTPSGTAPNQAQLRILKETELKRVKVLGSGAFGTVYKGIWVPEGETVKIPVAIKILNETTGPKANVEFMDEALIMASMDHPHLVRLLGVCLSPTIQLVTQLMPHGCLLEYVHEHKDNIGSQLLLNWCVQIAKGMMYLEERRLVHRDLAARNVLVKSPNHVKITDFGLARLLEGDEKEYNADGGKMPIKWMALECIHYRKFTHQSDVWSYGVTIWELMTFGGKPYDGIPTREIPDLLEKGERLPQPPICTIDVYMVMVKCWMIDADSRPKFKELAAEFSRMARDPQRYLVIQGDDRMKLPSPNDSKFFQNLLDEEDLEDMMDAEEYLVPQAFNIPPPIYTSRARIDSNRSEIGHSPPPAYTPMSGNQFVYRDGGFAAEQGVSVPYRAPTSTIPEAPVAQGATAEIFDDSCCNGTLRKPVAPHVQEDSSTQRYSADPTVFAPERSPRGELDEEGYMTPMRDKPKQEYLNPVEENPFVSRRKNGDLQALDNPEYHNASNGPPKAEDEYVNEPLYLNTFANTLGKAEYLKNNILSMPEKAKKAFDNPDYWNHSLPPRSTLQHPDYLQEYSTKYFYKQNGRIRPIVAENPEYLSEFSLKPGTVLPPPPYRHRNTVV

SEQ ID NO: 9 - DNA, 1503 bp, synthetic construct
  misc_feature 1..1503: note = HF110
  source 1..1503: mol_type = other DNA
ctggaggaaaagaaagtttgccaaggcacgagtaacaagctcacgcagttgggcacttttgaagatcattttctcagcctccagaggatgttcaataactgtgaggtggtccttgggaatttggaaattacctatgtgcagaggaattatgatctttccttcttaaagaccatccaggaggtggctggttatgtcctcattgccctcaacacagtggagcgaattcctttggaaaacctgcagatcatcagaggaaatatgtactacgaaaattcctatgccttagcagtcttatctaactatgatgcaaataaaaccggactgaaggagctgcccatgagaaatttacaggaaatcctgcatggcgccgtgcggttcagcaacaaccctgccctgtgcaacgtggagagcatccagtggcgggacatagtcagcagtgactttctcagcaacatgtcgatggacttccagaaccacctgggcagctgccaaaagtgtgatccaagctgtcccaatgggagctgctggggtgcaggagaggagaactgccagaaactgaccaaaatcatctgtgcccagcagtgctccgggcgctgccgtggcaagtcccccagtgactgctgccacaaccagtgtgctgcaggctgcacaggcccccgggagagcgactgcctggtctgccgcaaattccgagacgaagccacgtgcaaggacacctgccccccactcatgctctacaaccccaccacgtaccagatggatgtgaaccccgagggcaaatacagctttggtgccacctgcgtgaagaagtgtccccgtaattatgtggtgacagatcacggctcgtgcgtccgagcctgtggggccgacagctatgagatggaggaagacggcgtccgcaagtgtaagaagtgcgaagggccttgccgcaaagtgtgtaacggaataggtattggtgaatttaaagactcactctccataaatgctacgaatattaaacacttcaaaaactgcacctccatcagtggcgatctccacatcctgccggtggcatttaggggtgactccttcacacatactcctcctctggatccacaggaactggatattctgaaaaccgtaaaggaaatcacagggtttttgctgattcaggcttggcctgaaaacaggacggacctccatgcctttgagaacctagaaatcatacgcggcaggaccaagcaacatggtcagttttctcttgcagtcgtcagcctgaacataacatccttgggattacgctccctcaaggagataagtgatggagatgtgataatttcaggaaacaaaaatttgtgctatgcaaatacaataaactggaaaaaactgtttgggacctccggtcagaaaaccaaaattataagcaacagaggtgaaaacagctgcaaggccacaggccaggtctgccatgccttgtgctcccccgagggctgctggggcccggagcccagggactgcgtctct

SEQ ID NO: 10 - protein, 501 aa, synthetic construct
  REGION 1..501: note = HF110
LEEKKVCQGTSNKLTQLGTFEDHFLSLQRMFNNCEVVLGNLEITYVQRNYDLSFLKTIQEVAGYVLIALNTVERIPLENLQIIRGNMYYENSYALAVLSNYDANKTGLKELPMRNLQEILHGAVRFSNNPALCNVESIQWRDIVSSDFLSNMSMDFQNHLGSCQKCDPSCPNGSCWGAGEENCQKLTKIICAQQCSGRCRGKSPSDCCHNQCAAGCTGPRESDCLVCRKFRDEATCKDTCPPLMLYNPTTYQMDVNPEGKYSFGATCVKKCPRNYVVTDHGSCVRACGADSYEMEEDGVRKCKKCEGPCRKVCNGIGIGEFKDSLSINATNIKHFKNCTSISGDLHILPVAFRGDSFTHTPPLDPQELDILKTVKEITGFLLIQAWPENRTDLHAFENLEIIRGRTKQHGQFSLAVVSLNITSLGLRSLKEISDGDVIISGNKNLCYANTINWKKLFGTSGQKTKIISNRGENSCKATGQVCHALCSPEGCWGPEPRDCVS

SEQ ID NO: 11 - DNA, 1863 bp, synthetic construct
  misc_feature 1..1863: note = HF100
  source 1..1863: mol_type = other DNA
ctggaggaaaagaaagtttgccaaggcacgagtaacaagctcacgcagttgggcacttttgaagatcattttctcagcctccagaggatgttcaataactgtgaggtggtccttgggaatttggaaattacctatgtgcagaggaattatgatctttccttcttaaagaccatccaggaggtggctggttatgtcctcattgccctcaacacagtggagcgaattcctttggaaaacctgcagatcatcagaggaaatatgtactacgaaaattcctatgccttagcagtcttatctaactatgatgcaaataaaaccggactgaaggagctgcccatgagaaatttacaggaaatcctgcatggcgccgtgcggttcagcaacaaccctgccctgtgcaacgtggagagcatccagtggcgggacatagtcagcagtgactttctcagcaacatgtcgatggacttccagaaccacctgggcagctgccaaaagtgtgatccaagctgtcccaatgggagctgctggggtgcaggagaggagaactgccagaaactgaccaaaatcatctgtgcccagcagtgctccgggcgctgccgtggcaagtcccccagtgactgctgccacaaccagtgtgctgcaggctgcacaggcccccgggagagcgactgcctggtctgccgcaaattccgagacgaagccacgtgcaaggacacctgccccccactcatgctctacaaccccaccacgtaccagatggatgtgaaccccgagggcaaatacagctttggtgccacctgcgtgaagaagtgtccccgtaattatgtggtgacagatcacggctcgtgcgtccgagcctgtggggccgacagctatgagatggaggaagacggcgtccgcaagtgtaagaagtgcgaagggccttgccgcaaagtgtgtaacggaataggtattggtgaatttaaagactcactctccataaatgctacgaatattaaacacttcaaaaactgcacctccatcagtggcgatctccacatcctgccggtggcatttaggggtgactccttcacacatactcctcctctggatccacaggaactggatattctgaaaaccgtaaaggaaatcacagggtttttgctgattcaggcttggcctgaaaacaggacggacctccatgcctttgagaacctagaaatcatacgcggcaggaccaagcaacatggtcagttttctcttgcagtcgtcagcctgaacataacatccttgggattacgctccctcaaggagataagtgatggagatgtgataatttcaggaaacaaaaatttgtgctatgcaaatacaataaactggaaaaaactgtttgggacctccggtcagaaaaccaaaattataagcaacagaggtgaaaacagctgcaaggccacaggccaggtctgccatgccttgtgctcccccgagggctgctggggcccggagcccagggactgcgtctcttgccggaatgtcagccgaggcagggaatgcgtggacaagtgcaaccttctggagggtgagccaagggagtttgtggagaactctgagtgcatacagtgccacccagagtgcctgcctcaggccatgaacatcacctgcacaggacggggaccagacaactgtatccagtgtgcccactacattgacggcccccactgcgtcaagacctgcccggcaggagtcatgggagaaaacaacaccctggtctggaagtacgcagacgccggccatgtgtgccacctgtgccatccaaactgcacctacggatgcactgggccaggtcttgaaggctgtccaacgaatgggcctaagatcccgtcc

SEQ ID NO: 12 - protein, 621 aa, synthetic construct [sequence omitted]

SEQ ID NO: 13 - DNA, 1524 bp, synthetic construct
  misc_feature 1..1524: note = HF220
  source 1..1524: mol_type = other DNA
acccaagtgtgcaccggcacagacatgaagctgcggctccctgccagtcccgagacccacctggacatgctccgccacctctaccagggctgccaggtggtgcagggaaacctggaactcacctacctgcccaccaatgccagcctgtccttcctgcaggatatccaggaggtgcagggctacgtgctcatcgctcacaaccaagtgaggcaggtcccactgcagaggctgcggattgtgcgaggcacccagctctttgaggacaactatgccctggccgtgctagacaatggagacccgctgaacaataccacccctgtcacaggggcctccccaggaggcctgcgggagctgcagcttcgaagcctcacagagatcttgaaaggaggggtcttgatccagcggaacccccagctctgctaccaggacacgattttgtggaaggacatcttccacaagaacaaccagctggctctcacactgatagacaccaaccgctctcgggcctgccacccctgttctccgatgtgtaagggctcccgctgctggggagagagttctgaggattgtcagagcctgacgcgcactgtctgtgccggtggctgtgcccgctgcaaggggccactgcccactgactgctgccatgagcagtgtgctgccggctgcacgggccccaagcactctgactgcctggcctgcctccacttcaaccacagtggcatctgtgagctgcactgcccagccctggtcacctacaacacagacacgtttgagtccatgcccaatcccgagggccggtatacattcggcgccagctgtgtgactgcctgtccctacaactacctttctacggacgtgggatcctgcaccctcgtctgccccctgcacaaccaagaggtgacagcagaggatggaacacagcggtgtgagaagtgcagcaagccctgtgcccgagtgtgctatggtctgggcatggagcacttgcgagaggtgagggcagttaccagtgccaatatccaggagtttgctggctgcaagaagatctttgggagcctggcatttctgccggagagctttgatggggacccagcctccaacactgccccgctccagccagagcagctccaagtgtttgagactctggaagagatcacaggttacctatacatctcagcatggccggacagcctgcctgacctcagcgtcttccagaacctgcaagtaatccggggacgaattctgcacaatggcgcctactcgctgaccctgcaagggctgggcatcagctggctggggctgcgctcactgagggaactgggcagtggactggccctcatccaccataacacccacctctgcttcgtgcacacggtgccctgggaccagctctttcggaacccgcaccaagctctgctccacactgccaaccggccagaggacgagtgtgtgggcgagggcctggcctgccaccagctgtgcgcccgagggcactgctggggtccagggcccacccagtgtgtcaac

SEQ ID NO: 14 - protein, 508 aa, synthetic construct
  REGION 1..508: note = HF220
TQVCTGTDMKLRLPASPETHLDMLRHLYQGCQVVQGNLELTYLPTNASLSFLQDIQEVQGYVLIAHNQVRQVPLQRLRIVRGTQLFEDNYALAVLDNGDPLNNTTPVTGASPGGLRELQLRSLTEILKGGVLIQRNPQLCYQDTILWKDIFHKNNQLALTLIDTNRSRACHPCSPMCKGSRCWGESSEDCQSLTRTVCAGGCARCKGPLPTDCCHEQCAAGCTGPKHSDCLACLHFNHSGICELHCPALVTYNTDTFESMPNPEGRYTFGASCVTACPYNYLSTDVGSCTLVCPLHNQEVTAEDGTQRCEKCSKPCARVCYGLGMEHLREVRAVTSANIQEFAGCKKIFGSLAFLPESFDGDPASNTAPLQPEQLQVFETLEEITGYLYISAWPDSLPDLSVFQNLQVIRGRILHNGAYSLTLQGLGISWLGLRSLRELGSGLALIHHNTHLCFVHTVPWDQLFRNPHQALLHTANRPEDECVGEGLACHQLCARGHCWGPGPTQCVN

SEQ ID NO: 15 - DNA, 1719 bp, synthetic construct
  misc_feature 1..1719: note = HF210
  source 1..1719: mol_type = other DNA
acccaagtgtgcaccggcacagacatgaagctgcggctccctgccagtcccgagacccacctggacatgctccgccacctctaccagggctgccaggtggtgcagggaaacctggaactcacctacctgcccaccaatgccagcctgtccttcctgcaggatatccaggaggtgcagggctacgtgctcatcgctcacaaccaagtgaggcaggtcccactgcagaggctgcggattgtgcgaggcacccagctctttgaggacaactatgccctggccgtgctagacaatggagacccgctgaacaataccacccctgtcacaggggcctccccaggaggcctgcgggagctgcagcttcgaagcctcacagagatcttgaaaggaggggtcttgatccagcggaacccccagctctgctaccaggacacgattttgtggaaggacatcttccacaagaacaaccagctggctctcacactgatagacaccaaccgctctcgggcctgccacccctgttctccgatgtgtaagggctcccgctgctggggagagagttctgaggattgtcagagcctgacgcgcactgtctgtgccggtggctgtgcccgctgcaaggggccactgcccactgactgctgccatgagcagtgtgctgccggctgcacgggccccaagcactctgactgcctggcctgcctccacttcaaccacagtggcatctgtgagctgcactgcccagccctggtcacctacaacacagacacgtttgagtccatgcccaatcccgagggccggtatacattcggcgccagctgtgtgactgcctgtccctacaactacctttctacggacgtgggatcctgcaccctcgtctgccccctgcacaaccaagaggtgacagcagaggatggaacacagcggtgtgagaagtgcagcaagccctgtgcccgagtgtgctatggtctgggcatggagcacttgcgagaggtgagggcagttaccagtgccaatatccaggagtttgctggctgcaagaagatctttgggagcctggcatttctgccggagagctttgatggggacccagcctccaacactgccccgctccagccagagcagctccaagtgtttgagactctggaagagatcacaggttacctatacatctcagcatggccggacagcctgcctgacctcagcgtcttccagaacctgcaagtaatccggggacgaattctgcacaatggcgcctactcgctgaccctgcaagggctgggcatcagctggctggggctgcgctcactgagggaactgggcagtggactggccctcatccaccataacacccacctctgcttcgtgcacacggtgccctgggaccagctctttcggaacccgcaccaagctctgctccacactgccaaccggccagaggacgagtgtgtgggcgagggcctggcctgccaccagctgtgcgcccgagggcactgctggggtccagggcccacccagtgtgtcaactgcagccagttccttcggggccaggagtgcgtggaggaatgccgagtactgcaggggctccccagggagtatgtgaatgccaggcactgtttgccgtgccaccctgagtgtcagccccagaatggctcagtgacctgttttggaccggaggctgaccagtgtgtggcctgtgcccactataaggaccctcccttc

SEQ ID NO: 16 - protein, 573 aa, synthetic construct
  REGION 1..573: note = HF210
TQVCTGTDMKLRLPASPETHLDMLRHLYQGCQVVQGNLELTYLPTNASLSFLQDIQEVQGYVLIAHNQVRQVPLQRLRIVRGTQLFEDNYALAVLDNGDPLNNTTPVTGASPGGLRELQLRSLTEILKGGVLIQRNPQLCYQDTILWKDIFHKNNQLALTLIDTNRSRACHPCSPMCKGSRCWGESSEDCQSLTRTVCAGGCARCKGPLPTDCCHEQCAAGCTGPKHSDCLACLHFNHSGICELHCPALVTYNTDTFESMPNPEGRYTFGASCVTACPYNYLSTDVGSCTLVCPLHNQEVTAEDGTQRCEKCSKPCARVCYGLGMEHLREVRAVTSANIQEFAGCKKIFGSLAFLPESFDGDPASNTAPLQPEQLQVFETLEEITGYLYISAWPDSLPDLSVFQNLQVIRGRILHNGAYSLTLQGLGISWLGLRSLRELGSGLALIHHNTHLCFVHTVPWDQLFRNPHQALLHTANRPEDECVGEGLACHQLCARGHCWGPGPTQCVNCSQFLRGQECVEECRVLQGLPREYVNARHCLPCHPECQPQNGSVTCFGPEADQCVACAHYKDPPF

SEQ ID NO: 17 - DNA, 1884 bp, synthetic construct
  misc_feature 1..1884: note = HF200
  source 1..1884: mol_type = other DNA
acccaagtgtgcaccggcacagacatgaagctgcggctccctgccagtcccgagacccacctggacatgctccgccacctctaccagggctgccaggtggtgcagggaaacctggaactcacctacctgcccaccaatgccagcctgtccttcctgcaggatatccaggaggtgcagggctacgtgctcatcgctcacaaccaagtgaggcaggtcccactgcagaggctgcggattgtgcgaggcacccagctctttgaggacaactatgccctggccgtgctagacaatggagacccgctgaacaataccacccctgtcacaggggcctccccaggaggcctgcgggagctgcagcttcgaagcctcacagagatcttgaaaggaggggtcttgatccagcggaacccccagctctgctaccaggacacgattttgtggaaggacatcttccacaagaacaaccagctggctctcacactgatagacaccaaccgctctcgggcctgccacccctgttctccgatgtgtaagggctcccgctgctggggagagagttctgaggattgtcagagcctgacgcgcactgtctgtgccggtggctgtgcccgctgcaaggggccactgcccactgactgctgccatgagcagtgtgctgccggctgcacgggccccaagcactctgactgcctggcctgcctccacttcaaccacagtggcatctgtgagctgcactgcccagccctggtcacctacaacacagacacgtttgagtccatgcccaatcccgagggccggtatacattcggcgccagctgtgtgactgcctgtccctacaactacctttctacggacgtgggatcctgcaccctcgtctgccccctgcacaaccaagaggtgacagcagaggatggaacacagcggtgtgagaagtgcagcaagccctgtgcccgagtgtgctatggtctgggcatggagcacttgcgagaggtgagggcagttaccagtgccaatatccaggagtttgctggctgcaagaagatctttgggagcctggcatttctgccggagagctttgatggggacccagcctccaacactgccccgctccagccagagcagctccaagtgtttgagactctggaagagatcacaggttacctatacatctcagcatggccggacagcctgcctgacctcagcgtcttccagaacctgcaagtaatccggggacgaattctgcacaatggcgcctactcgctgaccctgcaagggctgggcatcagctggctggggctgcgctcactgagggaactgggcagtggactggccctcatccaccataacacccacctctgcttcgtgcacacggtgccctgggaccagctctttcggaacccgcaccaagctctgctccacactgccaaccggccagaggacgagtgtgtgggcgagggcctggcctgccaccagctgtgcgcccgagggcactgctggggtccagggcccacccagtgtgtcaactgcagccagttccttcggggccaggagtgcgtggaggaatgccgagtactgcaggggctccccagggagtatgtgaatgccaggcactgtttgccgtgccaccctgagtgtcagccccagaatggctcagtgacctgttttggaccggaggctgaccagtgtgtggcctgtgcccactataaggaccctcccttctgcgtggcccgctgccccagcggtgtgaaacctgacctctcctacatgcccatctggaagtttccagatgaggagggcgcatgccagccttgccccatcaactgcacccactcctgtgtggacctggatgacaagggctgccccgccgagcagagagccagccct

SEQ ID NO: 18 - protein, 628 aa, synthetic construct
  REGION 1..628: note = HF200
TQVCTGTDMKLRLPASPETHLDMLRHLYQGCQVVQGNLELTYLPTNASLSFLQDIQEVQGYVLIAHNQVRQVPLQRLRIVRGTQLFEDNYALAVLDNGDPLNNTTPVTGASPGGLRELQLRSLTEILKGGVLIQRNPQLCYQDTILWKDIFHKNNQLALTLIDTNRSRACHPCSPMCKGSRCWGESSEDCQSLTRTVCAGGCARCKGPLPTDCCHEQCAAGCTGPKHSDCLACLHFNHSGICELHCPALVTYNTDTFESMPNPEGRYTFGASCVTACPYNYLSTDVGSCTLVCPLHNQEVTAEDGTQRCEKCSKPCARVCYGLGMEHLREVRAVTSANIQEFAGCKKIFGSLAFLPESFDGDPASNTAPLQPEQLQVFETLEEITGYLYISAWPDSLPDLSVFQNLQVIRGRILHNGAYSLTLQGLGISWLGLRSLRELGSGLALIHHNTHLCFVHTVPWDQLFRNPHQALLHTANRPEDECVGEGLACHQLCARGHCWGPGPTQCVNCSQFLRGQECVEECRVLQGLPREYVNARHCLPCHPECQPQNGSVTCFGPEADQCVACAHYKDPPFCVARCPSGVKPDLSYMPIWKFPDEEGACQPCPINCTHSCVDLDDKGCPAEQRASP

SEQ ID NO: 19 - DNA, 1500 bp, synthetic construct
  misc_feature 1..1500: note = HF310
  source 1..1500: mol_type = other DNA
tccgaggtgggcaactctcaggcagtgtgtcctgggactctgaatggcctgagtgtgaccggcgatgctgagaaccaataccagacactgtacaagctctacgagaggtgtgaggtggtgatggggaaccttgagattgtgctcacgggacacaatgccgacctctccttcctgcagtggattcgagaagtgacaggctatgtcctcgtggccatgaatgaattctctactctaccattgcccaacctccgcgtggtgcgagggacccaggtctacgatgggaagtttgccatcttcgtcatgttgaactataacaccaactccagccacgctctgcgccagctccgcttgactcagctcaccgagattctgtcagggggtgtttatattgagaagaacgataagctttgtcacatggacacaattgactggagggacatcgtgagggaccgagatgctgagatagtggtgaaggacaatggcagaagctgtcccccctgtcatgaggtttgcaaggggcgatgctggggtcctggatcagaagactgccagacattgaccaagaccatctgtgctcctcagtgtaatggtcactgctttgggcccaaccccaaccagtgctgccatgatgagtgtgccgggggctgctcaggccctcaggacacagactgctttgcctgccggcacttcaatgacagtggagcctgtgtacctcgctgtccacagcctcttgtctacaacaagctaactttccagctggaacccaatccccacaccaagtatcagtatggaggagtttgtgtagccagctgtccccataactttgtggtggatcaaacatcctgtgtcagggcctgtcctcctgacaagatggaagtagataaaaatgggctcaagatgtgtgagccttgtgggggactatgtcccaaagcctgtgagggaacaggctctgggagccgcttccagactgtggactcgagcaacattgatggatttgtgaactgcaccaagatcctgggcaacctggactttctgatcaccggcctcaatggagacccctggcacaagatccctgccctggacccagagaagctcaatgtcttccggacagtacgggagatcacaggttacctgaacatccagtcctggccgccccacatgcacaacttcagtgttttttccaatttgacaaccattggaggcagaagcctctacaaccggggcttctcattgttgatcatgaagaacttgaatgtcacatctctgggcttccgatccctgaaggaaattagtgctgggcgtatctatataagtgccaataggcagctctgctaccaccactctttgaactggaccaaggtgcttcgggggcctacggaagagcgactagacatcaagcataatcggccgcgcagagactgcgtggcagagggcaaagtgtgtgacccactgtgctcctctgggggatgctggggcccaggccctggtcagtgcttgtcc

SEQ ID NO: 20 - protein, 500 aa, synthetic construct
  REGION 1..500: note = HF310
SEVGNSQAVCPGTLNGLSVTGDAENQYQTLYKLYERCEVVMGNLEIVLTGHNADLSFLQWIREVTGYVLVAMNEFSTLPLPNLRVVRGTQVYDGKFAIFVMLNYNTNSSHALRQLRLTQLTEILSGGVYIEKNDKLCHMDTIDWRDIVRDRDAEIVVKDNGRSCPPCHEVCKGRCWGPGSEDCQTLTKTICAPQCNGHCFGPNPNQCCHDECAGGCSGPQDTDCFACRHFNDSGACVPRCPQPLVYNKLTFQLEPNPHTKYQYGGVCVASCPHNFVVDQTSCVRACPPDKMEVDKNGLKMCEPCGGLCPKACEGTGSGSRFQTVDSSNIDGFVNCTKILGNLDFLITGLNGDPWHKIPALDPEKLNVFRTVREITGYLNIQSWPPHMHNFSVFSNLTTIGGRSLYNRGFSLLIMKNLNVTSLGFRSLKEISAGRIYISANRQLCYHHSLNWTKVLRGPTEERLDIKHNRPRRDCVAEGKVCDPLCSSGGCWGPGPGQCLS

SEQ ID NO: 21 - DNA, 1689 bp, synthetic construct
  misc_feature 1..1689: note = p85-HER3
  source 1..1689: mol_type = other DNA
atgagggcgaacgacgctctgcaggtgctgggcttgcttttcagcctggcccggggctccgaggtgggcaactctcaggcagtgtgtcctgggactctgaatggcctgagtgtgaccggcgatgctgagaaccaataccagacactgtacaagctctacgagaggtgtgaggtggtgatggggaaccttgagattgtgctcacgggacacaatgccgacctctccttcctgcagtggattcgagaagtgacaggctatgtcctcgtggccatgaatgaattctctactctaccattgcccaacctccgcgtggtgcgagggacccaggtctacgatgggaagtttgccatcttcgtcatgttgaactataacaccaactccagccacgctctgcgccagctccgcttgactcagctcaccgagattctgtcagggggtgtttatattgagaagaacgataagctttgtcacatggacacaattgactggagggacatcgtgagggaccgagatgctgagatagtggtgaaggacaatggcagaagctgtcccccctgtcatgaggtttgcaaggggcgatgctggggtcctggatcagaagactgccagacattgaccaagaccatctgtgctcctcagtgtaatggtcactgctttgggcccaaccccaaccagtgctgccatgatgagtgtgccgggggctgctcaggccctcaggacacagactgctttgcctgccggcacttcaatgacagtggagcctgtgtacctcgctgtccacagcctcttgtctacaacaagctaactttccagctggaacccaatccccacaccaagtatcagtatggaggagtttgtgtagccagctgtccccataactttgtggtggatcaaacatcctgtgtcagggcctgtcctcctgacaagatggaagtagataaaaatgggctcaagatgtgtgagccttgtgggggactatgtcccaaagcctgtgagggaacaggctctgggagccgcttccagactgtggactcgagcaacattgatggatttgtgaactgcaccaagatcctgggcaacctggactttctgatcaccggcctcaatggagacccctggcacaagatccctgccctggacccagagaagctcaatgtcttccggacagtacgggagatcacaggttacctgaacatccagtcctggccgccccacatgcacaacttcagtgttttttccaatttgacaaccattggaggcagaagcctctacaaccggggcttctcattgttgatcatgaagaacttgaatgtcacatctctgggcttccgatccctgaaggaaattagtgctgggcgtatctatataagtgccaataggcagctctgctaccaccactctttgaactggaccaaggtgcttcgggggcctacggaagagcgactagacatcaagcataatcggccgcgcagagactgcgtggcagagggcaaagtgtgtgacccactgtgctcctctgggggatgctggggcccaggccctggtcagtgcttgtcctgtcgaaattatagccgaggaggtgtctgtgtgacccactgcaactttctgaatgggtacagtaaggggagccagtcaaggatgggtgggggtggggccctgcaatggaactgttcaggtggcatacaataa

SEQ ID NO: 22 - protein, 562 aa, synthetic construct
  REGION 1..562: note = p85-HER3
MRANDALQVLGLLFSLARGSEVGNSQAVCPGTLNGLSVTGDAENQYQTLYKLYERCEVVMGNLEIVLTGHNADLSFLQWIREVTGYVLVAMNEFSTLPLPNLRVVRGTQVYDGKFAIFVMLNYNTNSSHALRQLRLTQLTEILSGGVYIEKNDKLCHMDTIDWRDIVRDRDAEIVVKDNGRSCPPCHEVCKGRCWGPGSEDCQTLTKTICAPQCNGHCFGPNPNQCCHDECAGGCSGPQDTDCFACRHFNDSGACVPRCPQPLVYNKLTFQLEPNPHTKYQYGGVCVASCPHNFVVDQTSCVRACPPDKMEVDKNGLKMCEPCGGLCPKACEGTGSGSRFQTVDSSNIDGFVNCTKILGNLDFLITGLNGDPWHKIPALDPEKLNVFRTVREITGYLNIQSWPPHMHNFSVFSNLTTIGGRSLYNRGFSLLIMKNLNVTSLGFRSLKEISAGRIYISANRQLCYHHSLNWTKVLRGPTEERLDIKHNRPRRDCVAEGKVCDPLCSSGGCWGPGPGQCLSCRNYSRGGVCVTHCNFLNGYSKGSQSRMGGGGALQWNCSGGIQ

SEQ ID NO: 23 - DNA, 1557 bp, synthetic construct
  misc_feature 1..1557: note = ErbB3-519
  source 1..1557: mol_type = other DNA
tccgaggtgggcaactctcaggcagtgtgtcctgggactctgaatggcctgagtgtgaccggcgatgctgagaaccaataccagacactgtacaagctctacgagaggtgtgaggtggtgatggggaaccttgagattgtgctcacgggacacaatgccgacctctccttcctgcagtggattcgagaagtgacaggctatgtcctcgtggccatgaatgaattctctactctaccattgcccaacctccgcgtggtgcgagggacccaggtctacgatgggaagtttgccatcttcgtcatgttgaactataacaccaactccagccacgctctgcgccagctccgcttgactcagctcaccgagattctgtcagggggtgtttatattgagaagaacgataagctttgtcacatggacacaattgactggagggacatcgtgagggaccgagatgctgagatagtggtgaaggacaatggcagaagctgtcccccctgtcatgaggtttgcaaggggcgatgctggggtcctggatcagaagactgccagacattgaccaagaccatctgtgctcctcagtgtaatggtcactgctttgggcccaaccccaaccagtgctgccatgatgagtgtgccgggggctgctcaggccctcaggacacagactgctttgcctgccggcacttcaatgacagtggagcctgtgtacctcgctgtccacagcctcttgtctacaacaagctaactttccagctggaacccaatccccacaccaagtatcagtatggaggagtttgtgtagccagctgtccccataactttgtggtggatcaaacatcctgtgtcagggcctgtcctcctgacaagatggaagtagataaaaatgggctcaagatgtgtgagccttgtgggggactatgtcccaaagcctgtgagggaacaggctctgggagccgcttccagactgtggactcgagcaacattgatggatttgtgaactgcaccaagatcctgggcaacctggactttctgatcaccggcctcaatggagacccctggcacaagatccctgccctggacccagagaagctcaatgtcttccggacagtacgggagatcacaggttacctgaacatccagtcctggccgccccacatgcacaacttcagtgttttttccaatttgacaaccattggaggcagaagcctctacaaccggggcttctcattgttgatcatgaagaacttgaatgtcacatctctgggcttccgatccctgaaggaaattagtgctgggcgtatctatataagtgccaataggcagctctgctaccaccactctttgaactggaccaaggtgcttcgggggcctacggaagagcgactagacatcaagcataatcggccgcgcagagactgcgtggcagagggcaaagtgtgtgacccactgtgctcctctgggggatgctggggcccaggccctggtcagtgcttgtcctgtcgaaattatagccgaggaggtgtctgtgtgacccactgcaactttctgaatggg

SEQ ID NO: 24 - protein, 519 aa, synthetic construct
  REGION 1..519: note = ErbB3-519
SEVGNSQAVCPGTLNGLSVTGDAENQYQTLYKLYERCEVVMGNLEIVLTGHNADLSFLQWIREVTGYVLVAMNEFSTLPLPNLRVVRGTQVYDGKFAIFVMLNYNTNSSHALRQLRLTQLTEILSGGVYIEKNDKLCHMDTIDWRDIVRDRDAEIVVKDNGRSCPPCHEVCKGRCWGPGSEDCQTLTKTICAPQCNGHCFGPNPNQCCHDECAGGCSGPQDTDCFACRHFNDSGACVPRCPQPLVYNKLTFQLEPNPHTKYQYGGVCVASCPHNFVVDQTSCVRACPPDKMEVDKNGLKMCEPCGGLCPKACEGTGSGSRFQTVDSSNIDGFVNCTKILGNLDFLITGLNGDPWHKIPALDPEKLNVFRTVREITGYLNIQSWPPHMHNFSVFSNLTTIGGRSLYNRGFSLLIMKNLNVTSLGFRSLKEISAGRIYISANRQLCYHHSLNWTKVLRGPTEERLDIKHNRPRRDCVAEGKVCDPLCSSGGCWGPGPGQCLSCRNYSRGGVCVTHCNFLNG

SEQ ID NO: 25 - DNA, 1863 bp, synthetic construct
  misc_feature 1..1863: note = HF300
  source 1..1863: mol_type = other DNA
tccgaggtgggcaactctcaggcagtgtgtcctgggactctgaatggcctgagtgtgaccggcgatgctgagaaccaataccagacactgtacaagctctacgagaggtgtgaggtggtgatggggaaccttgagattgtgctcacgggacacaatgccgacctctccttcctgcagtggattcgagaagtgacaggctatgtcctcgtggccatgaatgaattctctactctaccattgcccaacctccgcgtggtgcgagggacccaggtctacgatgggaagtttgccatcttcgtcatgttgaactataacaccaactccagccacgctctgcgccagctccgcttgactcagctcaccgagattctgtcagggggtgtttatattgagaagaacgataagctttgtcacatggacacaattgactggagggacatcgtgagggaccgagatgctgagatagtggtgaaggacaatggcagaagctgtcccccctgtcatgaggtttgcaaggggcgatgctggggtcctggatcagaagactgccagacattgaccaagaccatctgtgctcctcagtgtaatggtcactgctttgggcccaaccccaaccagtgctgccatgatgagtgtgccgggggctgctcaggccctcaggacacagactgctttgcctgccggcacttcaatgacagtggagcctgtgtacctcgctgtccacagcctcttgtctacaacaagctaactttccagctggaacccaatccccacaccaagtatcagtatggaggagtttgtgtagccagctgtccccataactttgtggtggatcaaacatcctgtgtcagggcctgtcctcctgacaagatggaagtagataaaaatgggctcaagatgtgtgagccttgtgggggactatgtcccaaagcctgtgagggaacaggctctgggagccgcttccagactgtggactcgagcaacattgatggatttgtgaactgcaccaagatcctgggcaacctggactttctgatcaccggcctcaatggagacccctggcacaagatccctgccctggacccagagaagctcaatgtcttccggacagtacgggagatcacaggttacctgaacatccagtcctggccgccccacatgcacaacttcagtgttttttccaatttgacaaccattggaggcagaagcctctacaaccggggcttctcattgttgatcatgaagaacttgaatgtcacatctctgggcttccgatccctgaaggaaattagtgctgggcgtatctatataagtgccaataggcagctctgctaccaccactctttgaactggaccaaggtgcttcgggggcctacggaagagcgactagacatcaagcataatcggccgcgcagagactgcgtggcagagggcaaagtgtgtgacccactgtgctcctctgggggatgctggggcccaggccctggtcagtgcttgtcctgtcgaaattatagccgaggaggtgtctgtgtgacccactgcaactttctgaatggggagcctcgagaatttgcccatgaggccgaatgcttctcctgccacccggaatgccaacccatggagggcactgccacatgcaatggctcgggctctgatacttgtgctcaatgtgcccattttcgagatgggccccactgtgtgagcagctgcccccatggagtcctaggtgccaagggcccaatctacaagtacccagatgttcagaatgaatgtcggccctgccatgagaactgcacccaggggtgtaaaggaccagagcttcaagactgtttaggacaaacactggtgctgatcggcaaaacc

SEQ ID NO: 26 - protein, 621 aa, synthetic construct
  REGION 1..621: note = HF300
SEVGNSQAVCPGTLNGLSVTGDAENQYQTLYKLYERCEVVMGNLEIVLTGHNADLSFLQWIREVTGYVLVAMNEFSTLPLPNLRVVRGTQVYDGKFAIFVMLNYNTNSSHALRQLRLTQLTEILSGGVYIEKNDKLCHMDTIDWRDIVRDRDAEIVVKDNGRSCPPCHEVCKGRCWGPGSEDCQTLTKTICAPQCNGHCFGPNPNQCCHDECAGGCSGPQDTDCFACRHFNDSGACVPRCPQPLVYNKLTFQLEPNPHTKYQYGGVCVASCPHNFVVDQTSCVRACPPDKMEVDKNGLKMCEPCGGLCPKACEGTGSGSRFQTVDSSNIDGFVNCTKILGNLDFLITGLNGDPWHKIPALDPEKLNVFRTVREITGYLNIQSWPPHMHNFSVFSNLTTIGGRSLYNRGFSLLIMKNLNVTSLGFRSLKEISAGRIYISANRQLCYHHSLNWTKVLRGPTEERLDIKHNRPRRDCVAEGKVCDPLCSSGGCWGPGPGQCLSCRNYSRGGVCVTHCNFLNGEPREFAHEAECFSCHPECQPMGGTATCNGSGSDTCAQCAHFRDGPHCVSSCPHGVLGAKGPIYKYPDVQNECRPCHENCTQGCKGPELQDCLGQTLVLIGKT

SEQ ID NO: 27 - DNA, 1380 bp, synthetic construct
  misc_feature 1..1380: note = HF410
  source 1..1380: mol_type = other DNA
cagtcagtgtgtgcaggaacggagaataaactgagctctctctctgacctggaacagcagtaccgagccttgcgcaagtactatgaaaactgtgaggttgtcatgggcaacctggagataaccagcattgagcacaaccgggacctctccttcctgcggtctgttcgagaagtcacaggctacgtgttagtggctcttaatcagtttcgttacctgcctctggagaatttacgcattattcgtgggacaaaactttatgaggatcgatatgccttggcaatatttttaaactacagaaaagatggaaactttggacttcaagaacttggattaaagaacttgacagaaatcctaaatggtggagtctatgtagaccagaacaaattcctttgttatgcagacaccattcattggcaagatattgttcggaacccatggccttccaacttgactcttgtgtcaacaaatggtagttcaggatgtggacgttgccataagtcctgtactggccgttgctggggacccacagaaaatcattgccagactttgacaaggacggtgtgtgcagaacaatgtgacggcagatgctacggaccttacgtcagtgactgctgccatcgagaatgtgctggaggctgctcaggacctaaggacacagactgctttgcctgcatgaatttcaatgacagtggagcatgtgttactcagtgtccccaaacctttgtctacaatccaaccacctttcaactggagcacaatttcaatgcaaagtacacatatggagcattctgtgtcaagaaatgtccacataactttgtggtagattccagttcttgtgtgcgtgcctgccctagttccaagatggaagtagaagaaaatgggattaaaatgtgtaaaccttgcactgacatttgcccaaaagcttgtgatggcattggcacaggatcattgatgtcagctcagactgtggattccagtaacattgacaaattcataaactgtaccaagatcaatgggaatttgatctttctagtcactggtattcatggggacccttacaatgcaattgaagccatagacccagagaaactgaacgtctttcggacagtcagagagataacaggtttcctgaacatacagtcatggccaccaaacatgactgacttcagtgttttttctaacctggtgaccattggtggaagagtactctatagtggcctgtccttgcttatcctcaagcaacagggcatcacctctctacagttccagtccctgaaggaaatcagcgcaggaaacatctatattactgacaacagcaacctgtgttattatcataccattaactggacaacactcttcagcacaatcaaccagagaata

SEQ ID NO: 28 - protein, 460 aa, synthetic construct
  REGION 1..460: note = HF410
QSVCAGTENKLSSLSDLEQQYRALRKYYENCEVVMGNLEITSIEHNRDLSFLRSVREVTGYVLVALNQFRYLPLENLRIIRGTKLYEDRYALAIFLNYRKDGNFGLQELGLKNLTEILNGGVYVDQNKFLCYADTIHWQDIVRNPWPSNLTLVSTNGSSGCGRCHKSCTGRCWGPTENHCQTLTRTVCAEQCDGRCYGPYVSDCCHRECAGGCSGPKDTDCFACMNFNDSGACVTQCPQTFVYNPTTFQLEHNFNAKYTYGAFCVKKCPHNFVVDSSSCVRACPSSKMEVEENGIKMCKPCTDICPKACDGIGTGSLMSAQTVDSSNIDKFINCTKINGNLIFLVTGIHGDPYNAIEAIDPEKLNVFRTVREITGFLNIQSWPPNMTDFSVFSNLVTIGGRVLYSGLSLLILKQQGITSLQFQSLKEISAGNIYITDNSNLCYYHTINWTTLFSTINQRI

SEQ ID NO: 29 - DNA, 1491 bp, synthetic construct
  misc_feature 1..1491: note = ERBB4-522
  source 1..1491: mol_type = other DNA
cagtcagtgtgtgcaggaacggagaataaactgagctctctctctgacctggaacagcagtaccgagccttgcgcaagtactatgaaaactgtgaggttgtcatgggcaacctggagataaccagcattgagcacaaccgggacctctccttcctgcggtctgttcgagaagtcacaggctacgtgttagtggctcttaatcagtttcgttacctgcctctggagaatttacgcattattcgtgggacaaaactttatgaggatcgatatgccttggcaatatttttaaactacagaaaagatggaaactttggacttcaagaacttggattaaagaacttgacagaaatcctaaatggtggagtctatgtagaccagaacaaattcctttgttatgcagacaccattcattggcaagatattgttcggaacccatggccttccaacttgactcttgtgtcaacaaatggtagttcaggatgtggacgttgccataagtcctgtactggccgttgctggggacccacagaaaatcattgccagactttgacaaggacggtgtgtgcagaacaatgtgacggcagatgctacggaccttacgtcagtgactgctgccatcgagaatgtgctggaggctgctcaggacctaaggacacagactgctttgcctgcatgaatttcaatgacagtggagcatgtgttactcagtgtccccaaacctttgtctacaatccaaccacctttcaactggagcacaatttcaatgcaaagtacacatatggagcattctgtgtcaagaaatgtccacataactttgtggtagattccagttcttgtgtgcgtgcctgccctagttccaagatggaagtagaagaaaatgggattaaaatgtgtaaaccttgcactgacatttgcccaaaagcttgtgatggcattggcacaggatcattgatgtcagctcagactgtggattccagtaacattgacaaattcataaactgtaccaagatcaatgggaatttgatctttctagtcactggtattcatggggacccttacaatgcaattgaagccatagacccagagaaactgaacgtctttcggacagtcagagagataacaggtttcctgaacatacagtcatggccaccaaacatgactgacttcagtgttttttctaacctggtgaccattggtggaagagtactctatagtggcctgtccttgcttatcctcaagcaacagggcatcacctctctacagttccagtccctgaaggaaatcagcgcaggaaacatctatattactgacaacagcaacctgtgttattatcataccattaactggacaacactcttcagcacaatcaaccagagaatagtaatccgggacaacagaaaagctgaaaattgtactgctgaaggaatggtgtgcaaccatctgtgttccagtgatggctgttggggacctgggccagaccaatgtctgtcg

SEQ ID NO: 30 - protein, 497 aa, synthetic construct
  REGION 1..497: note = ERBB4-522
QSVCAGTENKLSSLSDLEQQYRALRKYYENCEVVMGNLEITSIEHNRDLSFLRSVREVTGYVLVALNQFRYLPLENLRIIRGTKLYEDRYALAIFLNYRKDGNFGLQELGLKNLTEILNGGVYVDQNKFLCYADTIHWQDIVRNPWPSNLTLVSTNGSSGCGRCHKSCTGRCWGPTENHCQTLTRTVCAEQCDGRCYGPYVSDCCHRECAGGCSGPKDTDCFACMNFNDSGACVTQCPQTFVYNPTTFQLEHNFNAKYTYGAFCVKKCPHNFVVDSSSCVRACPSSKMEVEENGIKMCKPCTDICPKACDGIGTGSLMSAQTVDSSNIDKFINCTKINGNLIFLVTGIHGDPYNAIEAIDPEKLNVFRTVREITGFLNIQSWPPNMTDFSVFSNLVTIGGRVLYSGLSLLILKQQGITSLQFQSLKEISAGNIYITDNSNLCYYHTINWTTLFSTINQRIVIRDNRKAENCTAEGMVCNHLCSSDGCWGPGPDQCLS

SEQ ID NO: 31 - DNA, 1875 bp, synthetic construct
  misc_feature 1..1875: note = HF400
  source 1..1875: mol_type = other DNA
cagtcagtgtgtgcaggaacggagaataaactgagctctctctctgacctggaacagcagtaccgagccttgcgcaagtactatgaaaactgtgaggttgtcatgggcaacctggagataaccagcattgagcacaaccgggacctctccttcctgcggtctgttcgagaagtcacaggctacgtgttagtggctcttaatcagtttcgttacctgcctctggagaatttacgcattattcgtgggacaaaactttatgaggatcgatatgccttggcaatatttttaaactacagaaaagatggaaactttggacttcaagaacttggattaaagaacttgacagaaatcctaaatggtggagtctatgtagaccagaacaaattcctttgttatgcagacaccattcattggcaagatattgttcggaacccatggccttccaacttgactcttgtgtcaacaaatggtagttcaggatgtggacgttgccataagtcctgtactggccgttgctggggacccacagaaaatcattgccagactttgacaaggacggtgtgtgcagaacaatgtgacggcagatgctacggaccttacgtcagtgactgctgccatcgagaatgtgctggaggctgctcaggacctaaggacacagactgctttgcctgcatgaatttcaatgacagtggagcatgtgttactcagtgtccccaaacctttgtctacaatccaaccacctttcaactggagcacaatttcaatgcaaagtacacatatggagcattctgtgtcaagaaatgtccacataactttgtggtagattccagttcttgtgtgcgtgcctgccctagttccaagatggaagtagaagaaaatgggattaaaatgtgtaaaccttgcactgacatttgcccaaaagcttgtgatggcattggcacaggatcattgatgtcagctcagactgtggattccagtaacattgacaaattcataaactgtaccaagatcaatgggaatttgatctttctagtcactggtattcatggggacccttacaatgcaattgaagccatagacccagagaaactgaacgtctttcggacagtcagagagataacaggtttcctgaacatacagtcatggccaccaaacatgactgacttcagtgttttttctaacctggtgaccattggtggaagagtactctatagtggcctgtccttgcttatcctcaagcaacagggcatcacctctctacagttccagtccctgaaggaaatcagcgcaggaaacatctatattactgacaacagcaacctgtgttattatcataccattaactggacaacactcttcagcacaatcaaccagagaatagtaatccgggacaacagaaaagctgaaaattgtactgctgaaggaatggtgtgcaaccatctgtgttccagtgatggctgttggggacctgggccagaccaatgtctgtcgtgtcgccgcttcagtagaggaaggatctgcatagagtcttgtaacctctatgatggtgaatttcgggagtttgagaatggctccatctgtgtggagtgtgacccccagtgtgagaagatggaagatggcctcctcacatgccatggaccgggtcctgacaactgtacaaagtgctctcattttaaagatggcccaaactgtgtggaaaaatgtccagatggcttacagggggcaaacagtttcattttcaagtatgctgatccagatcgggagtgccacccatgccatccaaactgcacccaagggtgtaacggtcccactagtcatgactgcatttactacccatggacgggccattccactttaccacaacatgctagaact

SEQ ID NO: 32 - protein, 625 aa, synthetic construct
  REGION 1..625: note = HF400
QSVCAGTENKLSSLSDLEQQYRALRKYYENCEVVMGNLEITSIEHNRDLSFLRSVREVTGYVLVALNQFRYLPLENLRIIRGTKLYEDRYALAIFLNYRKDGNFGLQELGLKNLTEILNGGVYVDQNKFLCYADTIHWQDIVRNPWPSNLTLVSTNGSSGCGRCHKSCTGRCWGPTENHCQTLTRTVCAEQCDGRCYGPYVSDCCHRECAGGCSGPKDTDCFACMNFNDSGACVTQCPQTFVYNPTTFQLEHNFNAKYTYGAFCVKKCPHNFVVDSSSCVRACPSSKMEVEENGIKMCKPCTDICPKACDGIGTGSLMSAQTVDSSNIDKFINCTKINGNLIFLVTGIHGDPYNAIEAIDPEKLNVFRTVREITGFLNIQSWPPNMTDFSVFSNLVTIGGRVLYSGLSLLILKQQGITSLQFQSLKEISAGNIYITDNSNLCYYHTINWTTLFSTINQRIVIRDNRKAENCTAEGMVCNHLCSSDGCWGPGPDQCLSCRRFSRGRICIESCNLYDGEFREFENGSICVECDPQCEKMEDGLLTCHGPGPDNCTKCSHFKDGPNCVEKCPDGLQGANSFIFKYADPDRECHPCHPNCTQGCNGPTSHDCIYYPWTGHSTLPQHART

SEQ ID NO: 33 - DNA, 1365 bp, synthetic construct
  misc_feature 1..1365: note = HF120
  source 1..1365: mol_type = other DNA
ttggaggaaaagaaagtctgccaaggcacaagtaacaggctcacccaactgggcacttttgaagaccactttctgagcctgcagaggatgtacaacaactgtgaagtggtccttgggaacttggaaattacctatgtgcaaaggaattacgacctttccttcttaaaaaccatccaggaggtggccggctatttcctcattgccctcaacaccgtggagagaatcccttcggaggacctgcagatcatcaggggaaatgctctttatgaaaacacctatgccttagccatcctgtccaactatgggacaaacagaactgggcttagggaactgcccatgcggaacttacaggaaatcctgattggtgctgtgcgattcagcaacaaccccatcctctgcaatatggatactatccagtggagggacatcgtccaaaacgtctttatgagcaacatgtcaatggacttacagagccatccgagcagttgccccaaatgtgatccaagctgtcccaatggaagctgctggggaggaggagaggagaactgccagaaattgaccaaaatcatctgtgcccagcaatgttcccatcgctgtcgtggcaggtcccccagtgactgctgccacaaccaatgtgctgcggggtgtacagggccccaaaagagtgactgtctggtctgccaaaagttccaagatgaggccacatgcaaagacacctgcccaccactcatgctgtacaaccccaccacctatcagatggatgtcaaccctgaagggaagtacagctttggtgccacctgtgtgaagaactgcccccgaaactacgtggtgacagatcatggctcatgtgtccgagcctgtgggcctgactactacgaagtggaagaagatggcatccgcaagtgtaaaaaatgtgatgggccctgtcgcaaagtttgtaatggcataggcattggtgaatttaaagacacactctccataaatgctacaaacatcaaacacttcaaatactgcactgccatcagcggggaccttcacatcctgccagtggcctttaagggggattctttcacgcgcactcctcctctagacccacgggaactagaaattctcaagactgtgaaggaaataacagggtctttgctgattcaggcttggcctgaaaactggactgacctccatgcttttgagaacctagaaataattcgtggcagaacaaagcaacatggtcagttttctctggcggttgtcggcctgaacataacatcgctgccgtggcaggttccatcgctgtcgtggcaggctgtgacaaggcccttgcaccctctggcccaaaatagagtcagctgggacactgggccctag

SEQ ID NO: 34 - protein, 454 aa, synthetic construct
  REGION 1..454: note = HF120
LEEKKVCQGTSNRLTQLGTFEDHFLSLQRMYNNCEVVLGNLEITYVQRNYDLSFLKTIQEVAGYFLIALNTVERIPSEDLQIIRGNALYENTYALAILSNYGTNRTGLRELPMRNLQEILIGAVRFSNNPILCNMDTIQWRDIVQNVFMSNMSMDLQSHPSSCPKCDPSCPNGSCWGGGEENCQKLTKIICAQQCSHRCRGRSPSDCCHNQCAAGCTGPQKSDCLVCQKFQDEATCKDTCPPLMLYNPTTYQMDVNPEGKYSFGATCVKNCPRNYVVTDHGSCVRACGPDYYEVEEDGIRKCKKCDGPCRKVCNGIGIGEFKDTLSINATNIKHFKYCTAISGDLHILPVAFKGDSFTRTPPLDPRELEILKTVKEITGSLLIQAWPENWTDLHAFENLEIIRGRTKQHGQFSLAVVGLNITSLPWQVPSLSWQAVTRPLHPLAQNRVSWDTGP

SEQ ID NO: 35 - DNA, 1500 bp, synthetic construct
  misc_feature 1..1500: note = tPA-HIS-ERRP
  source 1..1500: mol_type = other DNA
atggatgcaatgaagagagggctctgctgtgtgctgctgctgtgtggagcagtcttcgtttcgcccagccaggaaatccatgcccgattcagaagaggagccagacatcatcaccatcaccataagcttggtaccttggaggaaaagaaagtctgccaaggcacaagtaacaggctcacccaactgggcacttttgaagaccactttctgagcctgcagaggatgtacaacaactgtgaagtggtccttgggaacttggaaattacctatgtgcaaaggaattacgacctttccttcttaaaaaccatccaggaggtggccggctatttcctcattgccctcaacaccgtggagagaatcccttcggaggacctgcagatcatcaggggaaatgctctttatgaaaacacctatgccttagccatcctgtccaactatgggacaaacagaactgggcttagggaactgcccatgcggaacttacaggaaatcctgattggtgctgtgcgattcagcaacaaccccatcctctgcaatatggatactatccagtggagggacatcgtccaaaacgtctttatgagcaacatgtcaatggacttacagagccatccgagcagttgccccaaatgtgatccaagctgtcccaatggaagctgctggggaggaggagaggagaactgccagaaattgaccaaaatcatctgtgcccagcaatgttcccatcgctgtcgtggcaggtcccccagtgactgctgccacaaccaatgtgctgcggggtgtacagggccccaaaagagtgactgtctggtctgccaaaagttccaagatgaggccacatgcaaagacacctgcccaccactcatgctgtacaaccccaccacctatcagatggatgtcaaccctgaagggaagtacagctttggtgccacctgtgtgaagaactgcccccgaaactacgtggtgacagatcatggctcatgtgtccgagcctgtgggcctgactactacgaagtggaagaagatggcatccgcaagtgtaaaaaatgtgatgggccctgtcgcaaagtttgtaatggcataggcattggtgaatttaaagacacactctccataaatgctacaaacatcaaacacttcaaatactgcactgccatcagcggggaccttcacatcctgccagtggcctttaagggggattctttcacgcgcactcctcctctagacccacgggaactagaaattctcaagactgtgaaggaaataacagggtctttgctgattcaggcttggcctgaaaactggactgacctccatgcttttgagaacctagaaataattcgtggcagaacaaagcaacatggtcagttttctctggcggttgtcggcctgaacataacatcgctgccgtggcaggttccatcgctgtcgtggcaggctgtgacaaggcccttgcaccctctggcccaaaatagagtcagctgggacactgggccctag

SEQ ID NO: 36 - protein, 499 aa, synthetic construct
  REGION 1..499: note = tPA-ERRP
MDAMKRGLCCVLLLCGAVFVSPSQEIHARFRRGARHHHHHHKLGTLEEKKVCQGTSNRLTQLGTFEDHFLSLQRMYNNCEVVLGNLEITYVQRNYDLSFLKTIQEVAGYFLIALNTVERIPSEDLQIIRGNALYENTYALAILSNYGTNRTGLRELPMRNLQEILIGAVRFSNNPILCNMDTIQWRDIVQNVFMSNMSMDLQSHPSSCPKCDPSCPNGSCWGGGEENCQKLTKIICAQQCSHRCRGRSPSDCCHNQCAAGCTGPQKSDCLVCQKFQDEATCKDTCPPLMLYNPTTYQMDVNPEGKYSFGATCVKNCPRNYVVTDHGSCVRACGPDYYEVEEDGIRKCKKCDGPCRKVCNGIGIGEFKDTLSINATNIKHFKYCTAISGDLHILPVAFKGDSFTRTPPLDPRELEILKTVKEITGSLLIQAWPENWTDLHAFENLEIIRGRTKQHGQFSLAVVGLNITSLPWQVPSLSWQAVTRPLHPLAQNRVSWDTGP

SEQ ID NO: 37 - DNA, 2250 bp, synthetic construct
  misc_feature 1..2250: note = HF110-FC-myc
  source 1..2250: mol_type = other DNA
ctggaggaaaagaaagtttgccaaggcacgagtaacaagctcacgcagttgggcacttttgaagatcattttctcagcctccagaggatgttcaataactgtgaggtggtccttgggaatttggaaattacctatgtgcagaggaattatgatctttccttcttaaagaccatccaggaggtggctggttatgtcctcattgccctcaacacagtggagcgaattcctttggaaaacctgcagatcatcagaggaaatatgtactacgaaaattcctatgccttagcagtcttatctaactatgatgcaaataaaaccggactgaaggagctgcccatgagaaatttacaggaaatcctgcatggcgccgtgcggttcagcaacaaccctgccctgtgcaacgtggagagcatccagtggcgggacatagtcagcagtgactttctcagcaacatgtcgatggacttccagaaccacctgggcagctgccaaaagtgtgatccaagctgtcccaatgggagctgctggggtgcaggagaggagaactgccagaaactgaccaaaatcatctgtgcccagcagtgctccgggcgctgccgtggcaagtcccccagtgactgctgccacaaccagtgtgctgcaggctgcacaggcccccgggagagcgactgcctggtctgccgcaaattccgagacgaagccacgtgcaaggacacctgccccccactcatgctctacaaccccaccacgtaccagatggatgtgaaccccgagggcaaatacagctttggtgccacctgcgtgaagaagtgtccccgtaattatgtggtgacagatcacggctcgtgcgtccgagcctgtggggccgacagctatgagatggaggaagacggcgtccgcaagtgtaagaagtgcgaagggccttgccgcaaagtgtgtaacggaataggtattggtgaatttaaagactcactctccataaatgctacgaatattaaacacttcaaaaactgcacctccatcagtggcgatctccacatcctgccggtggcatttaggggtgactccttcacacatactcctcctctggatccacaggaactggatattctgaaaaccgtaaaggaaatcacagggtttttgctgattcaggcttggcctgaaaacaggacggacctccatgcctttgagaacctagaaatcatacgcggcaggaccaagcaacatggtcagttttctcttgcagtcgtcagcctgaacataacatccttgggattacgctccctcaaggagataagtgatggagatgtgataatttcaggaaacaaaaatttgtgctatgcaaatacaataaactggaaaaaactgtttgggacctccggtcagaaaaccaaaattataagcaacagaggtgaaaacagctgcaaggccacaggccaggtctgccatgccttgtgctcccccgagggctgctggggcccggagcccagggactgcgtctctctcgagggaggaggaggaggacccaaatcttgtgacaaaactcacacatgcccaccgtgcccagcacctgaactcctggggggaccgtcagtcttcctcttccccccaaaacccaaggacaccctcatgatctcccggacccctgaggtcacatgcgtggtggtggacgtgagccacgaagaccctgaggtcaagttcaactggtacgtggacggcgtggaggtgcataatgccaagacaaagccgcgggaggagcagtacaacagcacgtaccgtgtggtcagcgtcctcaccgtcctgcaccaggactggctgaatggcaaggagtacaagtgcaaggtctccaacaaagccctcccagcccccatcgagaaaaccatctccaaagccaaagggcagccccgagaaccacaggtgtacaccctgcccccatcccgggaggagatgaccaagaaccaggtcagcctgacctgcctggtcaaaggcttctatcccagcgacatcgccgtggagtgggagagcaatgggcagccggagaacaactacaagaccacgcctcccgtgctggactccgacggctccttcttcctctatagcaagctcaccgtggacaagagcaggtggcagcaggggaacgtcttctcatgctccgtgatgcatgaggctctgcacaaccactacacgcagaagagcctctccctgtccccgggtaaagaacaaaaactcatctcagaagaggatctgtag

SEQ ID NO: 38 - protein, 749 aa, synthetic construct
  REGION 1..749: note = HF110-FC-myc
LEEKKVCQGTSNKLTQLGTFEDHFLSLQRMFNNCEVVLGNLEITYVQRNYDLSFLKTIQEVAGYVLIALNTVERIPLENLQIIRGNMYYENSYALAVLSNYDANKTGLKELPMRNLQEILHGAVRFSNNPALCNVESIQWRDIVSSDFLSNMSMDFQNHLGSCQKCDPSCPNGSCWGAGEENCQKLTKIICAQQCSGRCRGKSPSDCCHNQCAAGCTGPRESDCLVCRKFRDEATCKDTCPPLMLYNPTTYQMDVNPEGKYSFGATCVKKCPRNYVVTDHGSCVRACGADSYEMEEDGVRKCKKCEGPCRKVCNGIGIGEFKDSLSINATNIKHFKNCTSISGDLHILPVAFRGDSFTHTPPLDPQELDILKTVKEITGFLLIQAWPENRTDLHAFENLEIIRGRTKQHGQFSLAVVSLNITSLGLRSLKEISDGDVIISGNKNLCYANTINWKKLFGTSGQKTKIISNRGENSCKATGQVCHALCSPEGCWGPEPRDCVSLEGGGGGPKSCDKTHTCPPCPAPELLGGPSVFLFPPKPKDTLMISRTPEVTCVVVDVSHEDPEVKFNWYVDGVEVHNAKTKPREEQYNSTYRVVSVLTVLHQDWLNGKEYKCKVSNKALPAPIEKTISKAKGQPREPQVYTLPPSREEMTKNQVSLTCLVKGFYPSDIAVEWESNGQPENNYKTTPPVLDSDGSFFLYSKLTVDKSRWQQGNVFSCSVMHEALHNHYTQKSLSLSPGKEQKLISEEDL

SEQ ID NO: 39 - DNA, 2574 bp, synthetic construct
  misc_feature 1..2574: note = HF100-Fc
  source 1..2574: mol_type = other DNA
ctggaggaaaagaaagtttgccaaggcacgagtaacaagctcacgcagttgggcacttttgaagatcattttctcagcctccagaggatgttcaataactgtgaggtggtccttgggaatttggaaattacctatgtgcagaggaattatgatctttccttcttaaagaccatccaggaggtggctggttatgtcctcatcgccctcaacacagtggagcgaattcctttggaaaacctgcagatcatcagaggaaatatgtactacgaaaattcctatgccttagcagtcttatctaactatgatgcaaataaaaccggactgaaggagctgcccatgagaaatttacaggaaatcctgcatggcgccgtgcggttcagcaacaaccctgccctgtgcaacgtggagagcatccagtggcgggacatagtcagcagtgactttctcagcaacatgtcgatggacttccagaaccacctgggcagctgccaaaagtgtgatccaagctgtcccaatgggagctgctggggtgcaggagaggagaactgccagaaactgaccaaaatcatctgtgcccagcagtgctccgggcgctgccgtggcaagtcccccagtgactgctgccacaaccagtgtgctgcaggctgcacaggcccccgggagagcgactgcctagtctgccgcaaattccgagacgaagccacgtgcaaggacacctgccccccactcatgctctacaaccccaccacgtaccagatggatgtgaaccccgagggcaaatacagctttggtgccacctgcgtgaagaagtgtccccgtaattatgtggtgacagatcacggctcgtgcgtccgagcctgtggggccgacagctatgagatggaggaagacggcgtccgcaagtgtaagaagtgcgaagggccttgccgcaaagtgtgtaacggaataggtattggtgaatttaaagactcactctccataaatgctacgaatattaaacacttcaaaaactgcacctccatcagtggcgatctccacatcctgccggtggcatttaggggtgactccttcacacatactcctcctctggatccacaggaactggatattctgaaaaccgtaaaggaaatcacagggtttttgctgattcaggcttggcctgaaaacaggacggacctccatgcctttgagaacctagaaatcatacgcggcaggaccaagcaacatggtcagttttctcttgcagtcgtcagcctgaacataacatccttgggattacgctccctcaaggagataagtgatggagatgtgataatttcaggaaacaaaaatttgtgctatgcaaatacaataaactggaaaaaactgtttgggacctccggtcagaaaaccaaaattataagcaacagaggtgaaaacagctgcaaggccacaggccaggtctgccatgccttgtgctcccccgagggctgctggggcccggagcccagggactgcgtctcttgccggaatgtcagccgaggcagggaatgcgtggacaagtgcaaccttctggagggtgagccaagggagtttgtggagaactctgagtgcatacagtgccacccagagtgcctgcctcaggccatgaacatcacctgcacaggacggggaccagacaactgtatccagtgtgcccactacattgacggcccccactgcgtcaagacctgcccggcaggagtcatgggagaaaacaacaccctggtctggaagtacgcagacgccggccatgtgtgccacctgtgccatccaaactgcacctacggatgcactgggccaggtcttgaaggctgtccaacgaatgggcctaagatcccgtccggaggaggaggaggacccaaatcttgtgacaaaactcacacatgcccaccgtgcccagcacctgaactcctggggggaccgtcagtcttcctcttccccccaaaacccaaggacaccctcatgatctcccggacccctgaggtcacatgcgtggtggtggacgtgagccacgaagaccctgaggtcaagttcaactggtacgtggacggcgtggaggtgcataatgccaagacaaagccgcgggaggagcagtacaacagcacgtaccgtgtggtcagcgtcctcaccgtcctgcaccaggactggctgaatgacaaggagtacaagtgcaaggtctccaacaaagccctcccagcccccatcgagaaaaccatctccaaagccaaagggcagccccgagaaccacaggtgtacaccctgcccccatcccgggaggagatgaccaagaaccaggtcagcctgacctgcctggtcaaaggcttctatcccagcgacatcgccgtggagtgggagagcaatgggcagccggagaacaactacaagaccacgcctcccgtgctggactccgacggctccttcttcctctatagcaagctcaccgtggacaagagcaggtggcagcaggggaacgtcttctcatgctccgtgatgcatgaggctctgcacaaccactacacgcagaagagcctctccctgtccccgggtaaatag

SEQ ID NO: 40 - protein, 857 aa, synthetic construct
  REGION 1..857: note = HF100-Fc
LEEKKVCQGTSNKLTQLGTFEDHFLSLQRMFNNCEVVLGNLEITYVQRNYDLSFLKTIQEVAGYVLIALNTVERIPLENLQIIRGNMYYENSYALAVLSNYDANKTGLKELPMRNLQEILHGAVRFSNNPALCNVESIQWRDIVSSDFLSNMSMDFQNHLGSCQKCDPSCPNGSCWGAGEENCQKLTKIICAQQCSGRCRGKSPSDCCHNQCAAGCTGPRESDCLVCRKFRDEATCKDTCPPLMLYNPTTYQMDVNPEGKYSFGATCVKKCPRNYVVTDHGSCVRACGADSYEMEEDGVRKCKKCEGPCRKVCNGIGIGEFKDSLSINATNIKHFKNCTSISGDLHILPVAFRGDSFTHTPPLDPQELDILKTVKEITGFLLIQAWPENRTDLHAFENLEIIRGRTKQHGQFSLAVVSLNITSLGLRSLKEISDGDVIISGNKNLCYANTINWKKLFGTSGQKTKIISNRGENSCKATGQVCHALCSPEGCWGPEPRDCVSCRNVSRGRECVDKCNLLEGEPREFVENSECIQCHPECLPQAMNITCTGRGPDNCIQCAHYIDGPHCVKTCPAGVMGENNTLVWKYADAGHVCHLCHPNCTYGCTGPGLEGCPTNGPKIPSGGGGGPKSCDKTHTCPPCPAPELLGGPSVFLFPPKPKDTLMISRTPEVTCVVVDVSHEDPEVKFNWYVDGVEVHNAKTKPREEQYNSTYRVVSVLTVLHQDWLNDKEYKCKVSNKALPAPIEKTISKAKGQPREPQVYTLPPSREEMTKNQVSLTCLVKGFYPSDIAVEWESNGQPENNYKTTPPVLDSDGSFFLYSKLTVDKSRWQQGNVFSCSVMHEALHNHYTQKSLSLSPGK

SEQ ID NO: 41 - DNA, 2595 bp, synthetic construct
  misc_feature 1..2595: note = HF200-Fc
  source 1..2595: mol_type = other DNA
acccaagtgtgcaccggcacagacatgaagctgcggctccctgccagtcccgagacccacctggacatgctccgccacctctaccagggctgccaggtggtgcagggaaacctggaactcacctacctgcccaccaatgccagcctgtccttcctgcaggatatccaggaggtgcagggctacgtgctcatcgctcacaaccaagtgaggcaggtcccactgcagaggctgcggattgtgcgaggcacccagctctttgaggacaactatgccctggccgtgctagacaatggagacccgctgaacaataccacccctgtcacaggggcctccccaggaggcctgcgggagctgcagcttcgaagcctcacagagatcttgaaaggaggggtcttgatccagcggaacccccagctctgctaccaggacacgattttgtggaaggacatcttccacaagaacaaccagctggctctcacactgatagacaccaaccgctctcgggcctgccacccctgttctccgatgtgtaagggctcccgctgctggggagagagttctgaggattgtcagagcctgacgcgcactgtctgtgccggtggctgtgcccgctgcaaggggccactgcccactgactgctgccatgagcagtgtgctgccggctgcacgggccccaagcactctgactgcctggcctgcctccacttcaaccacagtggcatctgtgagctgcactgcccagccctggtcacctacaacacagacacgtttgagtccatgcccaatcccgagggccggtatacattcggcgccagctgtgtgactgcctgtccctacaactacctttctacggacgtgggatcctgcaccctcgtctgccccctgcacaaccaagaggtgacagcagaggatggaacacagcggtgtgagaagtgcagcaagccctgtgcccgagtgtgctatggtctgggcatggagcacttgcgagaggtgagggcagttaccagtgccaatatccaggagtttgctggctgcaagaagatctttgggagcctggcatttctgccggagagctttgatggggacccagcctccaacactgccccgctccagccagagcagctccaagtgtttgagactctggaagagatcacaggttacctatacatctcagcatggccggacagcctgcctgacctcagcgtcttccagaacctgcaagtaatccggggacgaattctgcacaatggcgcctactcgctgaccctgcaagggctgggcatcagctggctggggctgcgctcactgagggaactgggcagtggactggccctcatccaccataacacccacctctgcttcgtgcacacggtgccctgggaccagctctttcggaacccgcaccaagctctgctccacactgccaaccggccagaggacgagtgtgtgggcgagggcctggcctgccaccagctgtgcgcccgagggcactgctggggtccagggcccacccagtgtgtcaactgcagccagttccttcggggccaggagtgcgtggaggaatgccgagtactgcaggggctccccagggagtatgtgaatgccaggcactgtttgccgtgccaccctgagtgtcagccccagaatggctcagtgacctgttttggaccggaggctgaccagtgtgtggcctgtgcccactataaggaccctcccttctgcgtggcccgctgccccagcggtgtgaaacctgacctctcctacatgcccatctggaagtttccagatgaggagggcgcatgccagccttgccccatcaactgcacccactcctgtgtggacctggatgacaagggctgccccgccgagcagagagccagccctggaggaggaggaggacccaaatcttgtgacaaaactcacacatgcccaccgtgcccagcacctgaactcctggggggaccgtcagtcttcctcttccccccaaaacccaaggacaccctcatgatctcccggacccctgaggtcacatgcgtggtggtggacgtgagccacgaagaccctgaggtcaagttcaactggtacgtggacggcgtggaggtgcataatgccaagacaaagccgcgggaggagcagtacaacagcacgtaccgtgtggtcagcgtcctcaccgtcctgcaccaggactggctgaatggcaaggagtacaagtgcaaggtctccaacaaagccctcccagcccccatcgagaaaaccatctccaaagccaaagggcagccccgagaaccacaggtgtacaccctgcccccatcccgggaggagatgaccaagaaccaggtcagcctgacctgcctggtcaaaggcttctatcccagcgacatcgccgtggagtgggagagcaatgggcagccggagaacaactacaagaccacgcctcccgtgctggactccgacggctccttcttcctctatagcaagctcaccgtggacaagagcaggtggcagcaggggaacgtcttctcatgctccgtgatgcatgaggctctgcacaaccactacacgcagaagagcctctccctgtccccgggtaaatag

SEQ ID NO: 42 - protein, 864 aa, synthetic construct
  REGION 1..864: note = HF200-Fc
TQVCTGTDMKLRLPASPETHLDMLRHLYQGCQVVQGNLELTYLPTNASLSFLQDIQEVQGYVLIAHNQVRQVPLQRLRIVRGTQLFEDNYALAVLDNGDPLNNTTPVTGASPGGLRELQLRSLTEILKGGVLIQRNPQLCYQDTILWKDIFHKNNQLALTLIDTNRSRACHPCSPMCKGSRCWGESSEDCQSLTRTVCAGGCARCKGPLPTDCCHEQCAAGCTGPKHSDCLACLHFNHSGICELHCPALVTYNTDTFESMPNPEGRYTFGASCVTACPYNYLSTDVGSCTLVCPLHNQEVTAEDGTQRCEKCSKPCARVCYGLGMEHLREVRAVTSANIQEFAGCKKIFGSLAFLPESFDGDPASNTAPLQPEQLQVFETLEEITGYLYISAWPDSLPDLSVFQNLQVIRGRILHNGAYSLTLQGLGISWLGLRSLRELGSGLALIHHNTHLCFVHTVPWDQLFRNPHQALLHTANRPEDECVGEGLACHQLCARGHCWGPGPTQCVNCSQFLRGQECVEECRVLQGLPREYVNARHCLPCHPECQPQNGSVTCFGPEADQCVACAHYKDPPFCVARCPSGVKPDLSYMPIWKFPDEEGACQPCPINCTHSCVDLDDKGCPAEQRASPGGGGGPKSCDKTHTCPPCPAPELLGGPSVFLFPPKPKDTLMISRTPEVTCVVVDVSHEDPEVKFNWYVDGVEVHNAKTKPREEQYNSTYRVVSVLTVLHQDWLNGKEYKCKVSNKALPAPIEKTISKAKGQPREPQVYTLPPSREEMTKNQVSLTCLVKGFYPSDIAVEWESNGQPENNYKTTPPVLDSDGSFFLYSKLTVDKSRWQQGNVFSCSVMHEALHNHYTQKSLSLSPGK

SEQ ID NO: 43 - DNA, 2211 bp, synthetic construct
  misc_feature 1..2211: note = HF310-Fc
  source 1..2211: mol_type = other DNA
tccgaggtgggcaactctcaggcagtgtgtcctgggactctgaatggcctgagtgtgaccggcgatgctgagaaccaataccagacactgtacaagctctacgagaggtgtgaggtggtgatggggaaccttgagattgtgctcacgggacacaatgccgacctctccttcctgcagtggattcgagaagtgacaggctatgtcctcgtggccatgaatgaattctctactctaccattgcccaacctccgcgtggtgcgagggacccaggtctacgatgggaagtttgccatcttcgtcatgttgaactataacaccaactccagccacgctctgcgccagctccgcttgactcagctcaccgagattctgtcagggggtgtttatattgagaagaacgataagctttgtcacatggacacaattgactggagggacatcgtgagggaccgagatgctgagatagtggtgaaggacaatggcagaagctgtcccccctgtcatgaggtttgcaaggggcgatgctggggtcctggatcagaagactgccagacattgaccaagaccatctgtgctcctcagtgtaatggtcactgctttgggcccaaccccaaccagtgctgccatgatgagtgtgccgggggctgctcaggccctcaggacacagactgctttgcctgccggcacttcaatgacagtggagcctgtgtacctcgctgtccacagcctcttgtctacaacaagctaactttccagctggaacccaatccccacaccaagtatcagtatggaggagtttgtgtagccagctgtccccataactttgtggtggatcaaacatcctgtgtcagggcctgtcctcctgacaagatggaagtagataaaaatgggctcaagatgtgtgagccttgtgggggactatgtcccaaagcctgtgagggaacaggctctgggagccgcttccagactgtggactcgagcaacattgatggatttgtgaactgcaccaagatcctgggcaacctggactttctgatcaccggcctcaatggagacccctggcacaagatccctgccctggacccagagaagctcaatgtcttccggacagtacgggagatcacaggttacctgaacatccagtcctggccgccccacatgcacaacttcagtgttttttccaatttgacaaccattggaggcagaagcctctacaaccggggcttctcattgttgatcatgaagaacttgaatgtcacatctctgggcttccgatccctgaaggaaattagtgctgggcgtatctatataagtgccaataggcagctctgctaccaccactctttgaactggaccaaggtgcttcgggggcctacggaagagcgactagacatcaagcataatcggccgcgcagagactgcgtggcagagggcaaagtgtgtgacccactgtgctcctctgggggatgctggggcccaggccctggtcagtgcttgtccggaggaggaggaggacccaaatcttgtgacaaaactcacacatgcccaccgtgcccagcacctgaactcctggggggaccgtcagtcttcctcttccccccaaaacccaaggacaccctcatgatctcccggacccctgaggtcacatgcgtggtggtggacgtgagccacgaagaccctgaggtcaagttcaactggtacgtggacggcgtggaggtgcataatgccaagacaaagccgcgggaggagcagtacaacagcacgtaccgtgtggtcagcgtcctcaccgtcctgcaccaggactggctgaatggcaaggagtacaagtgcaaggtctccaacaaagccctcccagcccccatcgagaaaaccatctccaaagccaaagggcagccccgagaaccacaggtgtacaccctgcccccatcccgggaggagatgaccaagaaccaggtcagcctgacctgcctggtcaaaggcttctatcccagcgacatcgccgtggagtgggagagcaatgggcagccggagaacaactacaagaccacgcctcccgtgctggactccgacggctccttcttcctctatagcaagctcaccgtggacaagagcaggtggcagcaggggaacgtcttctcatgctccgtgatgcatgaggctctgcacaaccactacacgcagaagagcctctccctgtccccgggtaaatag

SEQ ID NO: 44 - protein, 736 aa, synthetic construct
  REGION 1..736: note = HF310-Fc
SEVGNSQAVCPGTLNGLSVTGDAENQYQTLYKLYERCEVVMGNLEIVLTGHNADLSFLQWIREVTGYVLVAMNEFSTLPLPNLRVVRGTQVYDGKFAIFVMLNYNTNSSHALRQLRLTQLTEILSGGVYIEKNDKLCHMDTIDWRDIVRDRDAEIVVKDNGRSCPPCHEVCKGRCWGPGSEDCQTLTKTICAPQCNGHCFGPNPNQCCHDECAGGCSGPQDTDCFACRHFNDSGACVPRCPQPLVYNKLTFQLEPNPHTKYQYGGVCVASCPHNFVVDQTSCVRACPPDKMEVDKNGLKMCEPCGGLCPKACEGTGSGSRFQTVDSSNIDGFVNCTKILGNLDFLITGLNGDPWHKIPALDPEKLNVFRTVREITGYLNIQSWPPHMHNFSVFSNLTTIGGRSLYNRGFSLLIMKNLNVTSLGFRSLKEISAGRIYISANRQLCYHHSLNWTKVLRGPTEERLDIKHNRPRRDCVAEGKVCDPLCSSGGCWGPGPGQCLSGGGGGPKSCDKTHTCPPCPAPELLGGPSVFLFPPKPKDTLMISRTPEVTCVVVDVSHEDPEVKFNWYVDGVEVHNAKTKPREEQYNSTYRVVSVLTVLHQDWLNGKEYKCKVSNKALPAPIEKTISKAKGQPREPQVYTLPPSREEMTKNQVSLTCLVKGFYPSDIAVEWESNGQPENNYKTTPPVLDSDGSFFLYSKLTVDKSRWQQGNVFSCSVMHEALHNHYTQKSLSLSPGK

SEQ ID NO: 45 - DNA, 2574 bp, synthetic construct
  misc_feature 1..2574: note = HF300-Fc
  source 1..2574: mol_type = other DNA
tccgaggtgggcaactctcaggcagtgtgtcctgggactctgaatggcctgagtgtgaccggcgatgctgagaaccaataccagacactgtacaagctctacgagaggtgtgaggtggtgatggggaaccttgagattgtgctcacgggacacaatgccgacctctccttcctgcagtggattcgagaagtgacaggctatgtcctcgtggccatgaatgaattctctactctaccattgcccaacctccgcgtggtgcgagggacccaggtctacgatgggaagtttgccatcttcgtcatgttgaactataacaccaactccagccacgctctgcgccagctccgcttgactcagctcaccgagattctgtcagggggtgtttatattgaggagaacgataagctttgtcacatggacacaattgactggagggacatcgtgagggaccgagatgctgagatagtggtgaaggacaatggcagaagctgtcccccctgtcatgaggtttgcaaggggcgatgctggggtcctggatcagaagactgccagacattgaccaagaccatctgtgctcctcagtgtaatggtcactgctttgggcccaaccccaaccagtgctgccatgatgagtgtgccgggggctgctcaggccctcaggacacagactgctttgcctgccggcacttcaatgacagtggagcctgtgtacctcgctgtccacagcctcttgtctacaacaagctaactttccagctggaacccaatccccacaccaagtatcagtatggaggagtttgtgtagccagctgtccccataactttgtggtggatcaaacatcctgtgtcagggcctgtcctcctgacaagatggaagtagataaaaatgggctcaagatgtgtgagccttgtgggggactatgtcccaaagcctgtgagggaacaggctctgggagccgcttccagactgtggactcgagcaacattgatggatttgtgaactgcaccaagatcctgggcaacctggactttctgatcaccggcctcaatggagacccctggcacaagatccctgccctggacccagagaagctcaatgtcttccggacagtacgggagatcacaggttacctgaacatccagtcctggccgccccacatgcacaacttcagtgttttttccaatttgacaaccattggaggcagaagcctctacaaccggggcttctcattgttgatcatgaagaacttgaatgtcacatctctgggcttccgatccctgaaggaaattagtgctgggcgtatctatataagtgccaataggcagctctgctaccaccactctttgaactggaccaaggtgcttcgggggcctacggaagagcgactagacatcaagcataatcggccgcgcagagactgcgtggcagagggcaaagtgtgtgacccactgtgctcctctgggggatgctggggcccaggccctggtcagtgcttgtcctgtcgaaattatagccgaggaggtgtctgtgtgacccactgcaactttctgaatggggagcctcgagaatttgcccatgaggccgaatgcttctcctgccacccggaatgccaacccatggggggcactgccacatgcaatggctcgggctctgatacttgtgctcaatgtgcccattttcgagatgggccccactgtgtgagcagctgcccccatggagtcctaggtgccaagggcccaatctacaagtacccagatgttcagaatgaatgtcggccctgccatgagaactgcacccaggggtgtaaaggaccagagcttcaagactgtttaggacaaacactggtgctgatcggcaaaaccggaggaggaggaggacccaaatcttgtgacaaaactcacacatgcccaccgtgcccagcacctgaactcctggggggaccgtcagtcttcctcttccccccaaaacccaaggacaccctcatgatctcccggacccctgaggtcacatgcgtggtggtggacgtgagccacgaagaccctgaggtcaagttcaactggtacgtggacggcgtggaggtgcataatgccaagacaaagccgcgggaggagcagtacaacagcacgtaccgtgtggtcagcgtcctcaccgtcctgcaccaggactggctgaatggcaaggagtacaagtgcaaggtctccaacaaagccctcccagcccccatcgagaaaaccatctccaaagccaaagggcagccccgagaaccacaggtgtacaccctgcccccatcccgggaggagatgaccaagaaccaggtcagcctgacctgcctggtcaaaggcttctatcccagcgacatcgccgtggagtgggagagcaatgggcagccggagaacaactacaagaccacgcctcccgtgctggactccgacggctccttcttcctctatagcaagctcaccgtggacaagagcaggtggcagcaggggaacgtcttctcatgctccgtgatgcatgaggctctgcacaaccactacacgcagaagagcctctccctgtccccgggtaaatag

SEQ ID NO: 46 - protein, 857 aa, synthetic construct
  REGION 1..857: note = HF300-Fc
SEVGNSQAVCPGTLNGLSVTGDAENQYQTLYKLYERCEVVMGNLEIVLTGHNADLSFLQWIREVTGYVLVAMNEFSTLPLPNLRVVRGTQVYDGKFAIFVMLNYNTNSSHALRQLRLTQLTEILSGGVYIEENDKLCHMDTIDWRDIVRDRDAEIVVKDNGRSCPPCHEVCKGRCWGPGSEDCQTLTKTICAPQCNGHCFGPNPNQCCHDECAGGCSGPQDTDCFACRHFNDSGACVPRCPQPLVYNKLTFQLEPNPHTKYQYGGVCVASCPHNFVVDQTSCVRACPPDKMEVDKNGLKMCEPCGGLCPKACEGTGSGSRFQTVDSSNIDGFVNCTKILGNLDFLITGLNGDPWHKIPALDPEKLNVFRTVREITGYLNIQSWPPHMHNFSVFSNLTTIGGRSLYNRGFSLLIMKNLNVTSLGFRSLKEISAGRIYISANRQLCYHHSLNWTKVLRGPTEERLDIKHNRPRRDCVAEGKVCDPLCSSGGCWGPGPGQCLSCRNYSRGGVCVTHCNFLNGEPREFAHEAECFSCHPECQPMGGTATCNGSGSDTCAQCAHFRDGPHCVSSCPHGVLGAKGPIYKYPDVQNECRPCHENCTQGCKGPELQDCLGQTLVLIGKTGGGGGPKSCDKTHTCPPCPAPELLGGPSVFLFPPKPKDTLMISRTPEVTCVVVDVSHEDPEVKFNWYVDGVEVHNAKTKPREEQYNSTYRVVSVLTVLHQDWLNGKEYKCKVSNKALPAPIEKTISKAKGQPREPQVYTLPPSREEMTKNQVSLTCLVKGFYPSDIAVEWESNGQPENNYKTTPPVLDSDGSFFLYSKLTVDKSRWQQGNVFSCSVMHEALHNHYTQKSLSLSPGK

SEQ ID NO: 47 - DNA, 2586 bp, synthetic construct
  misc_feature 1..2586: note = HF400-Fc
  source 1..2586: mol_type = other DNA
cagtcagtgtgtgcaggaacggagaataaactgagctctctctctgacctggaacagcagtaccgagccttgcgcaagtactatgaaaactgtgaggttgtcatgggcaacctggagataaccagcattgagcacaaccgggacctctccttcctgcggtctgttcgagaagtcacaggctacgtgttagtggctcttaatcagtttcgttacctgcctctggagaatttacgcattattcgtgggacaaaactttatgaggatcgatatgccttggcaatatttttaaactacagaaaagatggaaactttggacttcaagaacttggattaaagaacttgacagaaatcctaaatggtggagtctatgtagaccagaacaaattcctttgttatgcagacaccattcattggcaagatattgttcggaacccatggccttccaacttgacccttgtgtcaacaaatggtagttcaggatgtggacgttgccataagtcctgtactggccgttgctggggacccacagaaaatcattgccagactttgacaaggacggtgtgtgcagaacaatgtgacggcagatgctacggaccttacgtcagtgactgctgccatcgagaatgtgctggaggctgctcaggacctaaggacacagactgctttgcctgcatgaatttcaatgacagtggagcatgtgttactcagtgtccccaaacctttgtctacaatccaaccacctttcaactggagcacaatttcaatgcaaagtacacatatggagcattctgtgtcaagaaatgtccacataactttgtggtagattccagttcttgtgtgcgtgcctgccctagttccaagatggaagtagaagaaaatgggattaaaatgtgtaaaccttgcactgacatttgcccaaaagcttgtgatggcattggcacaggatcattgatgtcagctcagactgtggattccagtaacattgacaaattcataaactgtaccaagatcaatgggaatttgatctttctagtcactgctattcatggggacccttacaatgcaattgaagccatagacccagagaaactgaacgtctttcggacagtcagagagataacaggtttcctgaacatacagtcatggccaccaaacatgactgacttcagtgttttttctaacctggtgaccattggtggaagagtactctatagtggcctgtccttgcttatcctcaagcaacagggcatcacctctctacagttccagtccctgaaggaaatcagcgcaggaaacatctatattactgacaacagcaacctgtgttattatcataccattaactggacaacactcttcagcacaatcaaccagagaatagtaatccgggacaacagaaaagctgaaaattgtactgctgaaggaatggtgtgcaaccatctgtgttccagtgatggctgttggggacctgggccagaccaatgtctgtcgtgtcgccgcttcagtagaggaaggatctgcatagagtcttgtaacctctatgatggtgaatttcgggagtttgagaatggctccatctgtgtggagtgtgacccccagtgtgagaagatggaagatggcctcctcacatgccatggaccgggtcctgacaactgtacaaagtgctctcattttaaagatggcccaaactgtgtggaaaaatgtccagatggcttacagggggcaaacagtttcattttcaagtatgctgatccagatcgggagtgccacccatgccatccaaactgcacccaagggtgtaacggtcccactagtcatgactgcatttactacccatggacgggccattccactttaccacaacatgctagaactggaggaggaggaggacccaaatcttgtgacaaaactcacacatgcccaccgtgcccagcacctgaactcctggggggaccgtcagtcttcctcttccccccaaaacccaaggacaccctcatgatctcccggacccctgaggtcacatgcgtggtggtggacgtgagccacgaagaccctgaggtcaagttcaactggtacgtggacggcgtggaggtgcataatgccaagacaaagccgcgggaggagcagtacaacagcacgtaccgtgtggtcagcgtcctcaccgtcctgcacccggactggctgaatggcaaggagtacaagtgcaaggtctccaacaaagccctcccagcccccatcgagaaaaccatctccaaagccaaagggcagccccgagaaccacaggtgtacaccctgcccccatcccgggaggagatgaccaagaaccaggtcagcctgacctgcctggtcaaaggcttctatcccagcgacatcgccgtggagtgggagagcaatgggcagccggagaacaactacaagaccacgcctcccgtgctggactccgacggctccttcttcctctatagcaagctcaccgtggacaagagcaggtggcagcaggggaacgtcttctcatgctccgtgatgcatgaggctctgcacaaccactacacgcagaagagcctctccctgtccccgggtaaatag

SEQ ID NO: 48 - protein, 861 aa, synthetic construct
  REGION 1..861: note = HF400-Fc
QSVCAGTENKLSSLSDLEQQYRALRKYYENCEVVMGNLEITSIEHNRDLSFLRSVREVTGYVLVALNQFRYLPLENLRIIRGTKLYEDRYALAIFLNYRKDGNFGLQELGLKNLTEILNGGVYVDQNKFLCYADTIHWQDIVRNPWPSNLTLVSTNGSSGCGRCHKSCTGRCWGPTENHCQTLTRTVCAEQCDGRCYGPYVSDCCHRECAGGCSGPKDTDCFACMNFNDSGACVTQCPQTFVYNPTTFQLEHNFNAKYTYGAFCVKKCPHNFVVDSSSCVRACPSSKMEVEENGIKMCKPCTDICPKACDGIGTGSLMSAQTVDSSNIDKFINCTKINGNLIFLVTAIHGDPYNAIEAIDPEKLNVFRTVREITGFLNIQSWPPNMTDFSVFSNLVTIGGRVLYSGLSLLILKQQGITSLQFQSLKEISAGNIYITDNSNLCYYHTINWTTLFSTINQRIVIRDNRKAENCTAEGMVCNHLCSSDGCWGPGPDQCLSCRRFSRGRICIESCNLYDGEFREFENGSICVECDPQCEKMEDGLLTCHGPGPDNCTKCSHFKDGPNCVEKCPDGLQGANSFIFKYADPDRECHPCHPNCTQGCNGPTSHDCIYYPWTGHSTLPQHARTGGGGGPKSCDKTHTCPPCPAPELLGGPSVFLFPPKPKDTLMISRTPEVTCVVVDVSHEDPEVKFNWYVDGVEVHNAKTKPREEQYNSTYRVVSVLTVLHPDWLNGKEYKCKVSNKALPAPIEKTISKAKGQPREPQVYTLPPSREEMTKNQVSLTCLVKGFYPSDIAVEWESNGQPENNYKTTPPVLDSDGSFFLYSKLTVDKSRWQQGNVFSCSVMHEALHNHYTQKSLSLSPGK

SEQ ID NO: 49 - DNA, 25 bp, synthetic construct
  misc_feature 1..25: note = Fc primer forward
  source 1..25: mol_type = other DNA
cccaaatcttgtgacaaaactactc

SEQ ID NO: 50 - DNA, 19 bp, synthetic construct
  misc_feature 1..19: note = Fc primer reverse
  source 1..19: mol_type = other DNA
tttacccggggacagggag

SEQ ID NO: 51 - DNA, 44 bp, synthetic construct
  misc_feature 1..44: note = primer containing an XhoI site
  source 1..44: mol_type = other DNA
attactcgagggacgaatggaccccaaatcttgtgacaaaactc

SEQ ID NO: 52 - DNA, 29 bp, synthetic construct
  misc_feature 1..29: note = primer containing an AgeI site
  source 1..29: mol_type = other DNA
acttaccggttttacccggggacagggag

SEQ ID NO: 53 - DNA, 44 bp, synthetic construct
  misc_feature 1..44: note = primer containing an XbaI site
  source 1..44: mol_type = other DNA
attatctagaggacgaatggaccccaaatcttgtgacaaaactc

SEQ ID NO: 54 - protein, 118 aa, synthetic construct
  REGION 1..118: note = S11-N128
SNKLTQLGTFEDHFLVSLQRMFNNCEVLGNLEITYVQRNYDLSFLKTIQEVAGYVLIALNTVERIPLENLQIIRGNMYYENSYALAVLSNYDANKTGLKELPMRNLQEILHGAVRFSN

SEQ ID NO: 55 - protein, 143 aa, synthetic construct
  REGION 1..143: note = L325-I467
LSINATNIKHFKNCTSISGDLHILPVAFRGDSFTHTPPLDPQELDILKTVKEITGFLLIQAWPENRTDLHAFENLEIIRGRTKQHGQFSLAVVSLNITSLGLRSLKEISDGDVIISGNKNLCYANTINWKKLFGTSGQKTKII

SEQ ID NO: 56 - protein, 128 aa, synthetic construct
  REGION 1..128: note = D9-R136
DMKLRLPASPETHLDMLRHLYQGCQVVQGNLELTYLPTNASLSFLQDIQEVQGYVLIAHNQVRQVPLQRLRIVRGTQLFEDNYALAVLDNGDPLNNTTPVTGASPGGLRELQLRSLTEILKGGVLIQR

SEQ ID NO: 57 - protein, 143 aa, synthetic construct
  REGION 1..143: note = R333-T475
RAVTSANIQEFAGCKKIFGSLAFLPESFDGDPASNTAPLQPEQLQVFETLEEITGYLYISAWPDSLPDLSVFQNLQVIRGRILHNGAYSLTLQGLGISWLGLRSLRELGSGLALIHHNTHLCFVHTVPWDQLFRNPHQALLHT

SEQ ID NO: 58 - protein, 118 aa, synthetic construct
  REGION 1..118: note = L14-K132
LNGLSVTGDAENQYQTLYKLYERCEVVMGNLEIVLTGHNADLSFLQWIREVTGYVLVAMNEFSTLPLPNLRVVRGTQVYDGKFAIFVMLNYNTNSSHALRQLRLTQLTEILSGGVYIE

SEQ ID NO: 59 - protein, 145 aa, synthetic construct
  REGION 1..145: note = Q322-K466
QTVDSSNIDGFVNCTKILGNLDFLITGLNGDPWHKIPALDPEKLNVFRTVREITGYLNIQSWPPHMHNFSVFSNLTTIGGRSLYNRGFSLLIMKNLNVTSLGFRSLKEISAGRIYISANRQLCYHHSLNWTKVLRGPTEERLDIK

SEQ ID NO: 60 - protein, 119 aa, synthetic construct
  REGION 1..119: note = E8-Q126
ENKLSSLSDLEQQYRALRKYYENCEVVMGNLEITSIEHNRDLSFLRSVREVTGYVLVALNQFRYLPLENLRIIRGTKLYEDRYALAIFLNYRKDGNFGLQELGLKNLTEILNGGVYVDQ

SEQ ID NO: 61 - protein, 143 aa, synthetic construct
  REGION 1..143: note = Q321-R463
QTVDSSNIDKFINCTKINGNLIFLVTGIHGDPYNAIEAIDPEKLNVFRTVREITGFLNIQSWPPNMTDFSVFSNLVTIGGRVLYSGLSLLILKQQGITSLQFQSLKEISAGNIYITDNSNLCYYHTINWTTLFSTINQRIVIR

SEQ ID NO: 62 - protein, 10 aa, synthetic construct
  REGION 1..10: note = HER3 1.1.5
CWGPGSEDCQ

SEQ ID NO: 63 - protein, 10 aa, synthetic construct
  REGION 1..10: note = HER4 1.1.5
CWGPTENNCQ

SEQ ID NO: 64 - protein, 10 aa, synthetic construct
  REGION 1..10: note = HER1 1.1.5
CWGAGEENCQ

SEQ ID NO: 65 - protein, 10 aa, synthetic construct
  REGION 1..10: note = HER2 1.1.5
CWGESSEDCQ

SEQ ID NO: 66 - protein, 12 aa, synthetic construct
  REGION 1..12: note = HER3 2.1.1
LTKTICAPQCNG

SEQ ID NO: 67 - protein, 12 aa, synthetic construct
  REGION 1..12: note = HER4 2.1.1
LTRTVCAEQCDG

SEQ ID NO: 68 - protein, 12 aa, synthetic construct
  REGION 1..12: note = HER1 2.1.1
LTKIICAQQCSG

SEQ ID NO: 69 - protein, 11 aa, synthetic construct
  REGION 1..11: note = HER2 2.1.1
LTRTVCAGGCA

SEQ ID NO: 70 - protein, 7 aa, synthetic construct
  REGION 1..7: note = HER3 1.1.1
NPNQCCH

SEQ ID NO: 71 - protein, 7 aa, synthetic construct
  REGION 1..7: note = HER4 1.1.1
YVSDCCH

SEQ ID NO: 72 - protein, 7 aa, synthetic construct
  REGION 1..7: note = HER1 1.1.1
SPSDCCH

SEQ ID NO: 73 - protein, 7 aa, synthetic construct
  REGION 1..7: note = HER2 1.1.1
LPTDCCH

SEQ ID NO: 74 - protein, 17 aa, synthetic construct
  REGION 1..17: note = HER3 1.1.2
ECAGGCSGPQDTDCFAC

SEQ ID NO: 75 - protein, 17 aa, synthetic construct
  REGION 1..17: note = HER4 1.1.2
ECAGGCSGPKDTDCFAC

SEQ ID NO: 76 - protein, 17 aa, synthetic construct
  REGION 1..17: note = HER1 1.1.2
QCAAGCTGPRESDCLVC

SEQ ID NO: 77 - protein, 17 aa, synthetic construct
  REGION 1..17: note = HER2 1.1.2
QCAAGCTGPKNSDCLAC

SEQ ID NO: 78 - protein, 12 aa, synthetic construct
  REGION 1..12: note = HER3 1.1.6
SGACVPRCPQPL

SEQ ID NO: 79 - protein, 12 aa, synthetic construct
  REGION 1..12: note = HER4 1.1.6
SGACVTQCPQTF

SEQ ID NO: 80 - protein, 12 aa, synthetic construct
  REGION 1..12: note = HER1 1.1.6
EATCKDTCPPLM

SEQ ID NO: 81 - protein, 12 aa, synthetic construct
  REGION 1..12: note = HER2 1.1.6
SGICELHCPALV

SEQ ID NO: 82 - protein, 7 aa, synthetic construct
  REGION 1..7: note = HER3 1.1.3
CPHNFVV

SEQ ID NO: 83 - protein, 7 aa, synthetic construct
  REGION 1..7: note = HER4 1.1.3
CPHNFVV

SEQ ID NO: 84 - protein, 7 aa, synthetic construct
  REGION 1..7: note = HER1 1.1.3
CPRNYVV

SEQ ID NO: 85 - protein, 7 aa, synthetic construct
  REGION 1..7: note = HER2 1.1.3
CPYNYLS

SEQ ID NO: 86 - protein, 12 aa, synthetic construct
  REGION 1..12: note = HER3 2.1.4
DQTSCVRACPPD

SEQ ID NO: 87 - protein, 12 aa, synthetic construct
  REGION 1..12: note = HER4 2.1.4
DSSSCVRACPSS

SEQ ID NO: 88 - protein, 12 aa, synthetic construct
  REGION 1..12: note = HER1 2.1.4
DHGSCVRACGAD

SEQ ID NO: 89 - protein, 12 aa, synthetic construct
  REGION 1..12: note = HER2 2.1.4
DHGSCVRACGAD

SEQ ID NO: 90 - protein, 9 aa, synthetic construct
  REGION 1..9: note = HER3 1.1.4
MEVDKNGLK

SEQ ID NO: 91 - protein, 9 aa, synthetic construct
  REGION 1..9: note = HER4 1.1.4
MEVEENGIK

SEQ ID NO: 92 - protein, 9 aa, synthetic construct
  REGION 1..9: note = HER1 1.1.4
YEMEEDGVR

SEQ ID NO: 93 - protein, 10 aa, synthetic construct
  REGION 1..10: note = HER2 1.1.4
QEVTAEDGTQ

SEQ ID NO: 94 - protein, 12 aa, synthetic construct
  REGION 1..12: note = HER3 1.2.1
LCSSGGCWGPGP

SEQ ID NO: 95 - protein, 12 aa, synthetic construct
  REGION 1..12: note = HER4 1.2.1
LCSSDGCWGPGP

SEQ ID NO: 96 - protein, 12 aa, synthetic construct
  REGION 1..12: note = HER1 1.2.1
LCSPEGCWGPEP

SEQ ID NO: 97 - protein, 12 aa, synthetic construct
  REGION 1..12: note = HER2 1.2.1
LCARGHCWGPGP

SEQ ID NO: 98 - protein, 12 aa, synthetic construct
  REGION 1..12: note = HER3 1.2.5
LCARGHCWGPGP

SEQ ID NO: 99 - protein, 10 aa, synthetic construct
  REGION 1..10: note = HER4 1.2.5
SCRRFSRGRI

SEQ ID NO: 100 - protein, 10 aa, synthetic construct
  REGION 1..10: note = HER1 1.2.5
SCRNVSRGRE

SEQ ID NO: 101 - protein, 10 aa, synthetic construct
  REGION 1..10: note = HER2 1.2.5
NCSQFLRGQE

SEQ ID NO: 102 - protein, 11 aa, synthetic construct
  REGION 1..11: note = HER3 1.2.2
CNFLNGEPREF

SEQ ID NO: 103 - protein, 11 aa, synthetic construct
  REGION 1..11: note = HER4 1.2.2
CNLYDGEFREF

SEQ ID NO: 104 - protein, 11 aa, synthetic construct
  REGION 1..11: note = HER1 1.2.2
CNLLEGEPREF

SEQ ID NO: 105 - protein, 11 aa, synthetic construct
  REGION 1..11: note = HER2 1.2.2
CRVLQGLPREY

SEQ ID NO: 106 - protein, 7 aa, synthetic construct
  REGION 1..7: note = HER3 1.2.6
AHEAECF

SEQ ID NO: 107 - protein, 7 aa, synthetic construct
  REGION 1..7: note = HER4 1.2.6
ENGSICV

SEQ ID NO: 108 - protein, 7 aa, synthetic construct
  REGION 1..7: note = HER1 1.2.6
VENSECI

SEQ ID NO: 109 - protein, 7 aa, synthetic construct
  REGION 1..7: note = HER2 1.2.6
VNARHCL

SEQ ID NO: 110 - protein, 7 aa, synthetic construct
  REGION 1..7: note = HER3 1.2.7
TATCNGS

SEQ ID NO: 111 - protein, 7 aa, synthetic construct
  REGION 1..7: note = HER4 1.2.7
LLTCHGP

SEQ ID NO: 112 - protein, 7 aa, synthetic construct
  REGION 1..7: note = HER1 1.2.7
NITCTGR

SEQ ID NO: 113 - protein, 7 aa, synthetic construct
  REGION 1..7: note = HER2 1.2.7
SVTCFGP

SEQ ID NO: 114 - protein, 18 aa, synthetic construct
  REGION 1..18: note = HER3 1.2.3
GSDTCAQCAHFRDGPHCV

SEQ ID NO: 115 - protein, 18 aa, synthetic construct
  REGION 1..18: note = HER4 1.2.3
GPDNCTKCSHFKDGPNCV

SEQ ID NO: 116 - protein, 18 aa, synthetic construct
  REGION 1..18: note = HER1 1.2.3
GPDNCIQCAHYIDGPHCV

SEQ ID NO: 117 - protein, 18 aa, synthetic construct
  REGION 1..18: note = HER2 1.2.3
EADQCVACAHYKDPPFCV

SEQ ID NO: 118 - protein, 9 aa, synthetic construct
  REGION 1..9: note = HER3 2.2.1
IYKYPDVQN

SEQ ID NO: 119 - protein, 9 aa, synthetic construct
  REGION 1..9: note = HER4 2.2.1
IFKYADPDR

SEQ ID NO: 120 - protein, 9 aa, synthetic construct
  REGION 1..9: note = HER1 2.2.1
VWKYADAGH

SEQ ID NO: 121 - protein, 9 aa, synthetic construct
  REGION 1..9: note = HER2 2.2.1
IWKFPDEEG

SEQ ID NO: 122 - protein, 12 aa, synthetic construct
  REGION 1..12: note = HER3 1.2.4
CRPCHENCTQGC

SEQ ID NO: 123 - protein, 12 aa, synthetic construct
  REGION 1..12: note = HER4 1.2.4
CHPCHPNCTQGC

SEQ ID NO: 124 - protein, 12 aa, synthetic construct
  REGION 1..12: note = HER1 1.2.4
CHLCHPNCTYGC

SEQ ID NO: 125 - protein, 12 aa, synthetic construct
  REGION 1..12: note = HER2 1.2.4
CQPCPINCTHSC

SEQ ID NO: 126 - DNA, 1394 bp, synthetic construct
  misc_feature 1..1394: note = EGFR-int11
  source 1..1394: mol_type = other DNA
tcgggagagccggagcgagctcttcggggagcagcgatgcgaccctccgggacggccggggcagcgctcctggcgctgctggctgcgctctgcccggcgagtcgggctctggaggaaaagaaagtttgccaaggcacgagtaacaagctcacgcagttgggcacttttgaagatcattttctcagcctccagaggatgttcaataactgtgaggtggtccttgggaatttggaaattacctatgtgcagaggaattatgatctttccttcttaaagaccatccaggaggtggctggttatgtcctcattgccctcaacacagtggagcgaattcctttggaaaacctgcagatcatcagaggaaatatgtactacgaaaattcctatgccttagcagtcttatctaactatgatgcaaataaaaccggactgaaggagctgcccatgagaaatttacaggaaatcctgcatggcgccgtgcggttcagcaacaaccctgccctgtgcaacgtggagagcatccagtggcgggacatagtcagcagtgactttctcagcaacatgtcgatggacttccagaaccacctgggcagctgccaaaagtgtgatccaagctgtcccaatgggagctgctggggtgcaggagaggagaactgccagaaactgaccaaaatcatctgtgcccagcagtgctccgggcgctgccgtggcaagtcccccagtgactgctgccacaaccagtgtgctgcaggctgcacaggcccccgggagagcgactgcctggtctgccgcaaattccgagacgaagccacgtgcaaggacacctgccccccactcatgctctacaaccccaccacgtaccagatggatgtgaaccccgagggcaaatacagctttggtgccacctgcgtgaagaagtgtccccgtaattatgtggtgacagatcacggctcgtgcgtccgagcctgtggggccgacagctatgagatggaggaagacggcgtccgcaagtgtaagaagtgcgaagggccttgccgcaaagtgtgtaacggaataggtattggtgaatttaaagactcactctccataaatgctacgaatattaaacacttcaaaaactgcacctccatcagtggcgatctccacatcctgccggtggcatttaggggtgactccttcacacatactcctcctctggatccacaggaactggatattctgaaaaccgtaaaggaaatcacagggtttttgctgattcaggcttggcctgaaaacaggacggacctccatgcctttgagaacctagaaatcatacgcggcaggaccaagcaacagtaagttgaccacagccaaagcctggtagattacatttgcctttttagttggaaattagg

SEQ ID NO: 127 - protein, 433 aa, synthetic construct [sequence omitted]

SEQ ID NO: 128 - DNA, 2239 bp, synthetic construct
  misc_feature 1..2239: note = EGFR isoform b
  source 1..2239: mol_type = other DNA
ccccggcgcagcgcggccgcagcagcctccgccccccgcacggtgtgagcgcccgacgcggccgaggcggccggagtcccgagctagccccggcggccgccgccgcccagaccggacgacaggccacctcgtcggcgtccgcccgagtccccgcctcgccgccaacgccacaaccaccgcgcacggccccctgactccgtccagtattgatcgggagagccggagcgagctcttcggggagcagcgatgcgaccctccgggacggccggggcagcgctcctggcgctgctggctgcgctctgcccggcgagtcgggctctggaggaaaagaaagtttgccaaggcacgagtaacaagctcacgcagttgggcacttttgaagatcattttctcagcctccagaggatgttcaataactgtgaggtggtccttgggaatttggaaattacctatgtgcagaggaattatgatctttccttcttaaagaccatccaggaggtggctggttatgtcctcattgccctcaacacagtggagcgaattcctttggaaaacctgcagatcatcagaggaaatatgtactacgaaaattcctatgccttagcagtcttatctaactatgatgcaaataaaaccggactgaaggagctgcccatgagaaatttacaggaaatcctgcatggcgccgtgcggttcagcaacaaccctgccctgtgcaacgtggagagcatccagtggcgggacatagtcagcagtgactttctcagcaacatgtcgatggacttccagaaccacctgggcagctgccaaaagtgtgatccaagctgtcccaatgggagctgctggggtgcaggagaggagaactgccagaaactgaccaaaatcatctgtgcccagcagtgctccgggcgctgccgtggcaagtcccccagtgactgctgccacaaccagtgtgctgcaggctgcacaggcccccgggagagcgactgcctggtctgccgcaaattccgagacgaagccacgtgcaaggacacctgccccccactcatgctctacaaccccaccacgtaccagatggatgtgaaccccgagggcaaatacagctttggtgccacctgcgtgaagaagtgtccccgtaattatgtggtgacagatcacggctcgtgcgtccgagcctgtggggccgacagctatgagatggaggaagacggcgtccgcaagtgtaagaagtgcgaagggccttgccgcaaagtgtgtaacggaataggtattggtgaatttaaagactcactctccataaatgctacgaatattaaacacttcaaaaactgcacctccatcagtggcgatctccacatcctgccggtggcatttaggggtgactccttcacacatactcctcctctggatccacaggaactggatattctgaaaaccgtaaaggaaatcacagggtttttgctgattcaggcttggcctgaaaacaggacggacctccatgcctttgagaacctagaaatcatacgcggcaggaccaagcaacatggtcagttttctcttgcagtcgtcagcctgaacataacatccttgggattacgctccctcaaggagataagtgatggagatgtgataatttcaggaaacaaaaatttgtgctatgcaaatacaataaactggaaaaaactgtttgggacctccggtcagaaaaccaaaattataagcaacagaggtgaaaacagctgcaaggccacaggccaggtctgccatgccttgtgctcccccgagggctgctggggcccggagcccagggactgcgtctcttgccggaatgtcagccgaggcagggaatgcgtggacaagtgcaaccttctggagggtgagccaagggagtttgtggagaactctgagtgcatacagtgccacccagagtgcctgcctcaggccatgaacatcacctgcacaggacggggaccagacaactgtatccagtgtgcccactacattgacggcccccactgcgtcaagacctgcccggcaggagtcatgggagaaaacaacaccctggtctggaagtacgcagacgccggccatgtgtgccacctgtgccatccaaactgcacctacgggtcctaataaatcttcactgtctgactttagtctcccactaaaactgcatttcctttctacaatttcaatttctccctttgcttcaaataaagtcctgacactattcatttga

SEQ ID NO: 129 - protein, 628 aa, synthetic construct
  REGION 1..628: note = EGFR isoform b
MRPSGTAGAALLALLAALCPASRALEEKKVCQGTSNKLTQLGTFEDHFLSLQRMFNNCEVVLGNLEITYVQRNYDLSFLKTIQEVAGYVLIALNTVERIPLENLQIIRGNMYYENSYALAVLSNYDANKTGLKELPMRNLQEILHGAVRFSNNPALCNVESIQWRDIVSSDFLSNMSMDFQNHLGSCQKCDPSCPNGSCWGAGEENCQKLTKIICAQQCSGRCRGKSPSDCCHNQCAAGCTGPRESDCLVCRKFRDEATCKDTCPPLMLYNPTTYQMDVNPEGKYSFGATCVKKCPRNYVVTDHGSCVRACGADSYEMEEDGVRKCKKCEGPCRKVCNGIGIGEFKDSLSINATNIKHFKNCTSISGDLHILPVAFRGDSFTHTPPLDPQELDILKTVKEITGFLLIQAWPENRTDLHAFENLEIIRGRTKQHGQFSLAVVSLNITSLGLRSLKEISDGDVIISGNKNLCYANTINWKKLFGTSGQKTKIISNRGENSCKATGQVCHALCSPEGCWGPEPRDCVSCRNVSRGRECVDKCNLLEGEPREFVENSECIQCHPECLPQAMNITCTGRGPDNCIQCAHYIDGPHCVKTCPAGVMGENNTLVWKYADAGHVCHLCHPNCTYGS

SEQ ID NO: 130 - DNA, 2865 bp, synthetic construct
  misc_feature 1..2865: note = EGFR isoform d
  source 1..2865: mol_type = other DNA
ccccggcgcagcgcggccgcagcagcctccgccccccgcacggtgtgagcgcccgacgcggccgaggcggccggagtcccgagctagccccggcggccgccgccgcccagaccggacgacaggccacctcgtcggcgtccgcccgagtccccgcctcgccgccaacgccacaaccaccgcgcacggccccctgactccgtccagtattgatcgggagagccggagcgagctcttcggggagcagcgatgcgaccctccgggacggccggggcagcgctcctggcgctgctggctgcgctctgcccggcgagtcgggctctggaggaaaagaaagtttgccaaggcacgagtaacaagctcacgcagttgggcacttttgaagatcattttctcagcctccagaggatgttcaataactgtgaggtggtccttgggaatttggaaattacctatgtgcagaggaattatgatctttccttcttaaagaccatccaggaggtggctggttatgtcctcattgccctcaacacagtggagcgaattcctttggaaaacctgcagatcatcagaggaaatatgtactacgaaaattcctatgccttagcagtcttatctaactatgatgcaaataaaaccggactgaaggagctgcccatgagaaatttacaggaaatcctgcatggcgccgtgcggttcagcaacaaccctgccctgtgcaacgtggagagcatccagtggcgggacatagtcagcagtgactttctcagcaacatgtcgatggacttccagaaccacctgggcagctgccaaaagtgtgatccaagctgtcccaatgggagctgctggggtgcaggagaggagaactgccagaaactgaccaaaatcatctgtgcccagcagtgctccgggcgctgccgtggcaagtcccccagtgactgctgccacaaccagtgtgctgcaggctgcacaggcccccgggagagcgactgcctggtctgccgcaaattccgagacgaagccacgtgcaaggacacctgccccccactcatgctctacaaccccaccacgtaccagatggatgtgaaccccgagggcaaatacagctttggtgccacctgcgtgaagaagtgtccccgtaattatgtggtgacagatcacggctcgtgcgtccgagcctgtggggccgacagctatgagatggaggaagacggcgtccgcaagtgtaagaagtgcgaagggccttgccgcaaagtgtgtaacggaataggtattggtgaatttaaagactcactctccataaatgctacgaatattaaacacttcaaaaactgcacctccatcagtggcgatctccacatcctgccggtggcatttaggggtgactccttcacacatactcctcctctggatccacaggaactggatattctgaaaaccgtaaaggaaatcacagggtttttgctgattcaggcttggcctgaaaacaggacggacctccatgcctttgagaacctagaaatcatacgcggcaggaccaagcaacatggtcagttttctcttgcagtcgtcagcctgaacataacatccttgggattacgctccctcaaggagataagtgatggagatgtgataatttcaggaaacaaaaatttgtgctatgcaaatacaataaactggaaaaaactgtttgggacctccggtcagaaaaccaaaattataagcaacagaggtgaaaacagctgcaaggccacaggccaggtctgccatgccttgtgctcccccgagggctgctggggcccggagcccagggactgcgtctcttgccggaatgtcagccgaggcagggaatgcgtggacaagtgcaaccttctggagggtgagccaagggagtttgtggagaactctgagtgcatacagtgccacccagagtgcctgcctcaggccatgaacatcacctgcacaggacggggaccagacaactgtatccagtgtgcccactacattgacggcccccactgcgtcaagacctgcccggcaggagtcatgggagaaaacaacaccctggtctggaagtacgcagacgccggccatgtgtgccacctgtgccatccaaactgcacctacgggccaggaaatgagagtctcaaagccatgttattctgcctttttaaactatcatcctgtaatcaaagtaatgatggcagcgtgtcccaccagagcgggagcccagctgctcaggagtcatgcttaggatggatcccttctcttctgccgtcagagtttcagctgggttggggtggatgcagccacctccatgcctggccttctgcatctgtgatcatcacggcctcctcctgccactgagcctcatgccttcacgtgtctgttccccccgcttttcctttctgccacccctgcacgtgggccgccaggttcccaagagtatcctacccatttccttccttccactccctttgccagtgcctctcaccccaactagtagctaaccatcacccccaggactgacctcttcctcctcgctgccagatgattgttcaaagcacagaatttgtcagaaacctgcagggactccatgctgccagccttctccgtaattagcatggccccagtccatgcttctagccttggttccttctgcccctctgtttgaaattctagagccagctgtgggacaattatctgtgtcaaaagccagatgtgaaaacatctcaataacaaactggctgctttgttcaatgctagaacaacgcctgtcacagagtagaaactcaaaaatatttgctgagtgaatgaacaaatgaataaatgcataataaataattaaccaccaatccaacatccaga

SEQ ID NO: 131 - protein, 705 aa, synthetic construct
  REGION 1..705: note = EGFR isoform d
MRPSGTAGAALLALLAALCPASRALEEKKVCQGTSNKLTQLGTFEDHFLSLQRMFNNCEVVLGNLEITYVQRNYDLSFLKTIQEVAGYVLIALNTVERIPLENLQIIRGNMYYENSYALAVLSNYDANKTGLKELPMRNLQEILHGAVRFSNNPALCNVESIQWRDIVSSDFLSNMSMDFQNHLGSCQKCDPSCPNGSCWGAGEENCQKLTKIICAQQCSGRCRGKSPSDCCHNQCAAGCTGPRESDCLVCRKFRDEATCKDTCPPLMLYNPTTYQMDVNPEGKYSFGATCVKKCPRNYVVTDHGSCVRACGADSYEMEEDGVRKCKKCEGPCRKVCNGIGIGEFKDSLSINATNIKHFKNCTSISGDLHILPVAFRGDSFTHTPPLDPQELDILKTVKEITGFLLIQAWPENRTDLHAFENLEIIRGRTKQHGQFSLAVVSLNITSLGLRSLKEISDGDVIISGNKNLCYANTINWKKLFGTSGQKTKIISNRGENSCKATGQVCHALCSPEGCWGPEPRDCVSCRNVSRGRECVDKCNLLEGEPREFVENSECIQCHPECLPQAMNITCTGRGPDNCIQCAHYIDGPHCVKTCPAGVMGENNTLVWKYADAGHVCHLCHPNCTYGPGNESLKAMLFCLFKLSSCNQSNDGSVSHQSGSPAAQESCLGWIPSLLPSEFQLGWGGCSHLHAWPSASVIITASSCH

SEQ ID NO: 132 - DNA, 1595 bp, synthetic construct
  misc_feature 1..1595: note = EGFR isoform c
  source 1..1595: mol_type = other DNA
ccccggcgcagcgcggccgcagcagcctccgccccccgcacggtgtgagcgcccgacgcggccgaggcggccggagtcccgagctagccccggcggccgccgccgcccagaccggacgacaggccacctcgtcggcgtccgcccgagtccccgcctcgccgccaacgccacaaccaccgcgcacggccccctgactccgtccagtattgatcgggagagccggagcgagctcttcggggagcagcgatgcgaccctccgggacggccggggcagcgctcctggcgctgctggctgcgctctgcccggcgagtcgggctctggaggaaaagaaagtttgccaaggcacgagtaacaagctcacgcagttgggcacttttgaagatcattttctcagcctccagaggatgttcaataactgtgaggtggtccttgggaatttggaaattacctatgtgcagaggaattatgatctttccttcttaaagaccatccaggaggtggctggttatgtcctcattgccctcaacacagtggagcgaattcctttggaaaacctgcagatcatcagaggaaatatgtactacgaaaattcctatgccttagcagtcttatctaactatgatgcaaataaaaccggactgaaggagctgcccatgagaaatttacaggaaatcctgcatggcgccgtgcggttcagcaacaaccctgccctgtgcaacgtggagagcatccagtggcgggacatagtcagcagtgactttctcagcaacatgtcgatggacttccagaaccacctgggcagctgccaaaagtgtgatccaagctgtcccaatgggagctgctggggtgcaggagaggagaactgccagaaactgaccaaaatcatctgtgcccagcagtgctccgggcgctgccgtggcaagtcccccagtgactgctgccacaaccagtgtgctgcaggctgcacaggcccccgggagagcgactgcctggtctgccgcaaattccgagacgaagccacgtgcaaggacacctgccccccactcatgctctacaaccccaccacgtaccagatggatgtgaaccccgagggcaaatacagctttggtgccacctgcgtgaagaagtgtccccgtaattatgtggtgacagatcacggctcgtgcgtccgagcctgtggggccgacagctatgagatggaggaagacggcgtccgcaagtgtaagaagtgcgaagggccttgccgcaaagtgtgtaacggaataggtattggtgaatttaaagactcactctccataaatgctacgaatattaaacacttcaaaaactgcacctccatcagtggcgatctccacatcctgccggtggcatttaggggtgactccttcacacatactcctcctctggatccacaggaactggatattctgaaaaccgtaaaggaaatcacaggtttgagctgaattatcacatgaatataaatgggaaatcagtgttttagagagagaacttttcgacatatttcctgttcccttggaataaaaacatttcttctgaaattttaccgttaaaaaaaaaaaaaaaaaaaaaaaaa

SEQ ID NO: 133 - protein, 405 aa, synthetic construct
  REGION 1..405: note = EGFR isoform c
MRPSGTAGAALLALLAALCPASRALEEKKVCQGTSNKLTQLGTFEDHFLSLQRMFNNCEVVLGNLEITYVQRNYDLSFLKTIQEVAGYVLIALNTVERIPLENLQIIRGNMYYENSYALAVLSNYDANKTGLKELPMRNLQEILHGAVRFSNNPALCNVESIQWRDIVSSDFLSNMSMDFQNHLGSCQKCDPSCPNGSCWGAGEENCQKLTKIICAQQCSGRCRGKSPSDCCHNQCAAGCTGPRESDCLVCRKFRDEATCKDTCPPLMLYNPTTYQMDVNPEGKYSFGATCVKKCPRNYVVTDHGSCVRACGADSYEMEEDGVRKCKKCEGPCRKVCNGIGIGEFKDSLSINATNIKHFKNCTSISGDLHILPVAFRGDSFTHTPPLDPQELDILKTVKEITGLS

SEQ ID NO: 134 - DNA, 1316 bp, synthetic construct
  misc_feature 1..1316: note = herstatin
  source 1..1316: mol_type = other DNA
gcagtgagcaccatggagctggcggccttgtgccgctgggggctcctcctcgccctcttgccccccggagccgcgagcacccaagtgtgcaccggcacagacatgaagctgcggctccctgccagtcccgagacccacctggacatgctccgccacctctaccagggatgccaggtggtgcagggaaacctggaactcacctacctgcccaccaatgccagcctgtccttcctgcaggatatccaggaggtgcagggctacgtgctcatcgctcacaaccaagtgaggcaggtcccactgcagaggctgcggattgtgcgaggcacccagctctttgaggacaactatgccctggccgtgctagacaatggagacccgctgaacaataccacccctgtcacaggggcctccccaggaggcctgcgggagctgcagcttcgaagcctcacagagatcttgaaaggaggggtcttgatccagcggaacccccagctctgctaccaggacacgattttgtggaaggacatcttccacaagaacaaccagctggctctcacactgatagacaccaaccgctctcgggcctgccacccctgctctccgatgtgtaagggctcccgctgctggggagagagttctgaggattgtcagagcctgacgcgcactgtctgtgccggtggctgtgcccgctgcaaggggccactgcccactgactgctgccatgagcagtgtgctgccggctgcacgggccccaagcactctgactgcctggcctgcctccacttcaaccacagtggcatctgtgagctgcactgcccagccctggtcacctacaacacagacacgtttgagtccatgcccaatcccgagggccggtatacattcggcgccagctgtgtcactgcctgtccctacaactacctttctacggacgtgggatcctgcaccctcgtctgccccctgcacaaccaagaggtgacagcagaggatggaacacagcggtgtgagaagtgcagcaagccctgtgcccgaggtacccactcactgcccccgaggccagctgcagttcctgtccctctgcgcatgcagcctggcccagcccaccctgtcctatccttcctcagaccctcttgggacctagtctctgccttctactctctacccctggcccccctcagccctacaagtgtccctatatcccctgtcagtgtggggaggggcccggaccctgatgctcatgtggctgttgacctgtcccggtatgaaggctgagacggccccttccccacccacccccacctcctcagtgtgctatg

SEQ ID NO: 135 - protein, 419 aa, synthetic construct
  REGION 1..419: note = herstatin
MELAALCRWGLLLALLPPGAASTQVCTGTDMKLRLPASPETHLDMLRHLYQGCQVVQGNLELTYLPTNASLSFLQDIQEVQGYVLIAHNQVRQVPLQRLRIVRGTQLFEDNYALAVLDNGDPLNNTTPVTGASPGGLRELQLRSLTEILKGGVLIQRNPQLCYQDTILWKDIFHKNNQLALTLIDTNRSRACHPCSPMCKGSRCWGESSEDCQSLTRTVCAGGCARCKGPLPTDCCHEQCAAGCTGPKHSDCLACLHFNHSGICELHCPALVTYNTDTFESMPNPEGRYTFGASCVTACPYNYLSTDVGSCTLVCPLHNQEVTAEDGTQRCEKCSKPCARGTHSLPPRPAAVPVPLRMQPGPAHPVLSFLRPSWDLVSAFYSLPLAPLSPTSVPISPVSVGRGPDPDAHVAVDLSRYEG

SEQ ID NO: 136 - protein, 680 aa, synthetic construct
  REGION 1..680: note = ErbB2.1d
MELAALCRWGLLLALLPLPPGAASTQVCTGTDMKLRLPASPETHLDMLRHLYQGCQVVQGNLELTYLPTNASLSFLQDIQEVQGYVLIAHNQVRQVPLQRLRIVRGTQLFEDNYALAVLDNGDPLNNTTPVTGASPGGLRELQLRSLTEILKGGVLIQRNPQLCYQDTILWKDIFHKNNQLALTLIDTNRSRACHPCSPMCKGSRCWGESSEDCQSLTRTVCAGGCARCKGPLPTDCCHEQCAAGCTGPKHSDCLACLHFNHSGICELHCPALVTYNTDTFESMPNPEGRYTFGASCVTACPYNYLSTDVGSCTLVCPLHNQEVTAEDGTQRCEKCSKPCARVCYGLGMEHLREVRAVTSANIQEFAGCKKIFGSLAFLPESFDGDPASNTAPLQPEQLQVFETLEEITGYLYISAWPDSLPDLSVFQNLQVIRGRILHNGAYSLTLQGLGISWLGLRSLRELGSGLALIHHNTHLCFVHTVPWDQLFRNPHQALLHTANRPEDECVGEGLACHQLCARGHCWGPGPTQCVNCSQFLRGQECVEECRVLQGLPREYVNARHCLPCHPECQPQNGSVTCFGPEADQCVACAHYKDPPFCVARCPSGVKPDLSYMPIWKFPDEEGACQPCPINCTHSCVDLDDKGCPAEQRARLAWTPGCTLHCPSLPHWMLGGHCCREGTP

SEQ ID NO: 137 - protein, 633 aa, synthetic construct
  REGION 1..633: note = ErbB2.1e
MELAALCRWGLLLALLPPGAASTQVCTGTDMKLRLPASPETHLDMLRHLYQGCQVVQGNLELTYLPTNASLSFLQDIQEVQGYVLIAHNQVRQVPLQRLRIVRGTQLFEDNYALAVLDNGDPLNNTTPVTGASPGGLRELQLRSLTEILKGGVLIQRNPQLCYQDTILWKDIFHKNNQLALTLIDTNRSRACHPCSPMCKGSRCWGESSEDCQSLTRTVCAGGCARCKGPLPTDCCHEQCAAGCTGPKHSDCLACLHFNHSGICELHCPALVTYNTDTFESMPNPEGRYTFGASCVTACPYNYLSTDVGSCTLVCPLHNQEVTAEDGTQRCEKCSKPCARVCYGLGMEHLREVRAVTSANIQEFAGCKKIFGSLAFLPESFDGDPASNTAPLQPEQLQVFETLEEITGYLYISAWPDSLPDLSVFQNLQVIRGRILHNGAYSLTLQGLGISWLGLRSLRELGSGLALIHHNTHLCFVHTVPWDQLFRNPHQALLHTANRPEDECVGEGLACHQLCARGHCWGPGPTQCVNCSQFLRGQECVEECRVLQGLPREYVNARHCLPCHPECQPQNGSVTCFGPEADQCVACAHYKDPPFCVARCPSGVKPDLSYMPIWKFPDEEGACQPCPINCTHS

SEQ ID NO: 138 - protein, 575 aa, synthetic construct
  REGION 1..575: note = ErbB2.1f
MELAALCRWGLLLALLPPGAASTQVCTGTDMKLRLPASPETHLDMLRHLYQGCQVVQGNLELTYLPTNASLSFLQDIQEVQGYVLIAHNQVRQVPLQRLRIVRGTQLFEDNYALAVLDNGDPLNNTTPVTGASPGGLRELQLRSLTEILKGGVLIQRNPQLCYQDTILWKDIFHKNNQLALTLIDTNRSRACHPCSPMCKGSRCWGESSEDCQSLTRTVCAGGCARCKGPLPTDCCHEQCAAGCTGPKHSDCLACLHFNHSGICELHCPALVTYNTDTFESMPNPEGRYTFGASCVTACPYNYLSTDVGSCTLVCPLHNQEVTAEDGTQRCEKCSKPCARVCYGLGMEHLREVRAVTSANIQEFAGCKKIFGSLAFLPESFDGDPASNTAPLQPEQLQVFETLEEITGYLYISAWPDSLPDLSVFQNLQVIRGRILHNGAYSLTLQGLGISWLGLRSLRELGSGLALIHHYTHLCFVHTVPWDQLFRNPHQALLHTANRPEDECGKTGSPVCALPICQHTAVPRGPWQQRSWTCADCPSLCTLLDSAQLWLAWPLGMASLAGSYLPWHPSLPLCF

SEQ ID NO: 139 - protein, 90 aa, synthetic construct
  REGION 1..90: note = ErbB2.a
MELAALCRWGLLLALLPPGAASTQVCTGTDMKLRLPASPETHLDMLRHLYQGCQVVQGNLELTYLPTNASLSFLQVRPVGNPARPCLQLG

SEQ ID NO: 140 - DNA, 1383 bp, synthetic construct
  misc_feature 1..1383: note = HER2-int11
  source 1..1383: mol_type = other DNA
agtgagcaccatggagctggcggccttgtgccgctgggggctcctcctcgccctcttgccccccggagccgcgagcacccaagtgtgcaccggcacagacatgaagctgcggctccctgccagtcccgagacccacctggacatgctccgccacctctaccagggctgccaggtggtgcagggaaacctggaactcacctacctgcccaccaatgccagcctgtccttcctgcaggatatccaggaggtgcagggctacgtgctcatcgctcacaaccaagtgaggcaggtcccactgcagaggctgcggattgtgcgaggcacccagctctttgaggacaactatgccctggccgtgctagacaatggagacccgctgaacaataccacccctgtcacaggggcctccccaggaggcctgcgggagctgcagcttcgaagcctcacagagatcttgaaaggaggggtcttgatccagcggaacccccagctctgctaccaggacacgattttgtggaaggacatcttccacaagaacaaccagctggctctcacactgatagacaccaaccgctctcgggcctgccacccctgttctccgatgtgtaagggctcccgctgctggggagagagttctgaggattgtcagagcctgacgcgcactgtctgtgccggtggctgtgcccgctgcaaggggccactgcccactgactgctgccatgagcagtgtgctgccggctgcacgggccccaagcactctgactgcctggcctgcctccacttcaaccacagtggcatctgtgagctgcactgcccagccctggtcacctacaacacagacacgtttgagtccatgcccaatcccgagggccggtatacattcggcgccagctgtgtgactgcctgtccctacaactacctttctacggacgtgggatcctgcaccctcgtctgccccctgcacaaccaagaggtgacagcagaggatggaacacagcggtgtgagaagtgcagcaagccctgtgcccgagtgtgctatggtctgggcatggagcacttgcgagaggtgagggcagttaccagtgccaatatccaggagtttgctggctgcaagaagatctttgggagcctggcatttctgccggagagctttgatggggacccagcctccaacactgccccgctccagccagagcagctccaagtgtttgagactctggaagagatcacaggttacctatacatctcagcatggccggacagcctgcctgacctcagcgtcttccagaacctgcaagtaatccggggacgaattctgcacaagtgagcactgagaaagagggggcctgatggggaggagtcccagggaggagtccctgtggg

SEQ ID NO: 141 - protein, 438 aa, synthetic construct
  REGION 1..438: note = HER2-int11
MELAALCRWGLLLALLPPGAASTQVCTGTDMKLRLPASPETHLDMLRHLYQGCQVVQGNLELTYLPTNASLSFLQDIQEVQGYVLIAHNQVRQVPLQRLRIVRGTQLFEDNYALAVLDNGDPLNNTTPVTGASPGGLRELQLRSLTEILKGGVLIQRNPQLCYQDTILWKDIFHKNNQLALTLIDTNRSRACHPCSPMCKGSRCWGESSEDCQSLTRTVCAGGCARCKGPLPTDCCHEQCAAGCTGPKHSDCLACLHFNHSGICELHCPALVTYNTDTFESMPNPEGRYTFGASCVTACPYNYLSTDVGSCTLVCPLHNQEVTAEDGTQRCEKCSKPCARVCYGLGMEHLREVRAVTSANIQEFAGCKKIFGSLAFLPESFDGDPASNTAPLQPEQLQVFETLEEITGYLYISAWPDSLPDLSVFQNLQVIRGRILHK

SEQ ID NO: 142 - DNA, 2755 bp, synthetic construct
  misc_feature 1..2755: note = HER3 isoform
  source 1..2755: mol_type = other DNA
aattcgccagcggttcaggtggctcttgcctcgatgtcctagcctaggggcccccgggccggacttggctgggctcccttcaccctctgcggagtcatgagggcgaacgacgctctgcaggtgctgggcttgcttttcagcctggcccggggctccgaggtgggcaactctcaggcagtgtgtcctgggactctgaatggcctgagtgtgaccggcgatgctgagaaccaataccagacactgtacaagctctacgagaggtgtgaggtggtgatggggaaccttgagattgtgctcacgggacacaatgccgacctctccttcctgcagtggattcgagaagtgacaggctatgtcctcgtggccatgaatgaattctctactctaccattgcccaacctccgcgtggtgcgagggacccaggtctacgatgggaagtttgccatcttcgtcatgttgaactataacaccaactccagccacgctctgcgccagctccgcttgactcagctcaccgagattctgtcagggggtgtttatattgagaagaacgataagctttgtcacatggacacaattgactggagggacatcgtgagggaccgagatgctgagatagtggtgaaggacaatggcagaagctgtcccccctgtcatgaggtttgcaaggggcgatgctggggtcctggatcagaagactgccagacattgaccaagaccatctgtgctcctcagtgtaatggtcactgctttgggcccaaccccaaccagtgctgccatgatgagtgtgccgggggctgctcaggccctcaggacacagactgctttgcctgccggcacttcaatgacagtggagcctgtgtacctcgctgtccacagcctcttgtctacaacaagctaactttccagctggaacccaatccccacaccaagtatcagtatggaggagtttgtgtagccagctgtccccataactttgtggtggatcaaacatcctgtgtcagggcctgtcctcctgacaagatggaagtagataaaaatgggctcaagatgtgtgagccttgtgggggactatgtcccaaagccttttaagtccatcatctggatacatgcccatgaaccagggtaatcttggggagtcttgccaggagtctgcagtttctgggagcagtgaacggtgcccccgtccagtctctctacacccaatgccacggggatgcctggcatcagagtcatcagaggggcatgtaacaggctctgaggctgagctccaggagaaagtgtcaatgtgtaggagccggagcaggagccggagcccacggccacgcggagatagcgcctaccattcccagcgccacagtctgctgactcctgttaccccactctccccacccgggttagaggaagaggatgtcaacggttatgtcatgccagatacacacctcaaaggtactccctcctcccgggaaggcaccctttcttcagtgggtctcagttctgtcctgggtactgaagaagaagatgaagatgaggagtatgaatacatgaaccggaggagaaggcacagtccacctcatccccctaggccaagttcccttgaggagctgggttatgagtacatggatgtggggtcagacctcagtgcctctctgggcagcacacagagttgcccactccaccctgtacccatcatgcccactgcaggcacaactccagatgaagactatgaatatatgaatcggcaacgagatggaggtggtcctgggggtgattatgcagccatgggggcctgcccagcatctgagcaagggtatgaagagatgagagcttttcaggggcctggacatcaggccccccatgtccattatgcccgcctaaaaactctacgtagcttagaggctacagactctgcctttgataaccctgattactggcatagcaggcttttccccaaggctaatgcccagagaacgtaactcctgctccctgtggcactcagggagcatttaatggcagctagtgcctttagagggtaccgtcttctccctattccctctctctcccaggtcccagccccttttccccagtcccagacaattccattcaatctttggaggcttttaaacattttgacacaaaattcttatggtatgtagccagctgtgcactttcttctctttcccaaccccaggaaaggttttccttattttgtgtgctttcccagtcccattcctcagcttcttcacaggcactcctggagatatgaaggattactctccatatcccttcctctcaggctcttgactacttggaactaggctcttatgtgtgcctttgtttcccatcagactgtcaagaagaggaaagggaggaaacctagcagaggaaagtgtaattttggtttatgactcttaaccccctagaaagacagaagcttaaaatctgtgaagaaagaggttaggagtagatattgattactatcataattcagcacttaactatgagccaggcatcatactaaacttcacctacattatctcacttagtcctttatcatccttaaaacaattctgtgacatacatattatctcattttacacaaagggaagtcgggcatggtggctcatgcctgtaatctcagcactttgggaggctgaggcagaaggattacctgaggcaaggagtttgagaccagcttagccaacatagtaagacccccatctctttaaaaaaaaaaaaaaaaaaaaaaaaaaaa

SEQ ID NO: 143 - protein, 331 aa, synthetic construct
  REGION 1..331: note = HER3 isoform
MRANDALQVLGLLFSLARGSEVGNSQAVCPGTLNGLSVTGDAENQYQTLYKLYERCEVVMGNLEIVLTGHNADLSFLQWIREVTGYVLVAMNEFSTLPLPNLRVVRGTQVYDGKFAIFVMLNYNTNSSHALRQLRLTQLTEILSGGVYIEKNDKLCHMDTIDWRDIVRDRDAEIVVKDNGRSCPPCHEVCKGRCWGPGSEDCQTLTKTICAPQCNGHCFGPNPNQCCHDECAGGCSGPQDTDCFACRHFNDSGACVPRCPQPLVYNKLTFQLEPNPHTKYQYGGVCVASCPHNFVVDQTSCVRACPPDKMEVDKNGLKMCEPCGGLCPKAF

SEQ ID NO: 144 - protein, 183 aa, synthetic construct
  REGION 1..183: note = HER3 isoform 2
MRANDALQVLGLLFSLARGSEVGNSQAVCPGTLNGLSVTGDAENQYQTLYKLYERCEVVMGNLEIVLTGHNADLSFLQWIREVTGYVLVAMNEFSTLPLPNLRVVRGTQVYDGKFAIFVMLNYNTNSSHALRQLRLTQLTGQFPMVPSGLTPQPAQDWYLLDDDPRLLTLSASSKVPVTLAAV

SEQ ID NO: 145 - DNA, 1296 bp, synthetic construct
  misc_feature 1..1296: note = HER3-int10
  source 1..1296: mol_type = other DNA
ctaggggcccccgggccggacttggctgggctcccttcaccctctgcggagtcatgagggcgaacgacgctctgcaggtgctgggcttgcttttcagcctggcccggggctccgaggtgggcaactctcaggcagtgtgtcctgggactctgaatggcctgagtgtgaccggcgatgctgagaaccaataccagacactgtacaagctctacgagaggtgtgaggtggtgatggggaaccttgagattgtgctcacgggacacaatgccgacctctccttcctgcagtggattcgagaagtgacaggctatgtcctcgtggccatgaatgaattctctactctaccattgcccaacctccgcgtggtgcgagggacccaggtctacgatgggaagtttgccatcttcgtcatgttgaactataacaccaactccagccacgctctgcgccagctccgcttgactcagctcaccgagattctgtcagggggtgtttatattgagaagaacgataagctttgtcacatggacacaattgactggagggacatcgtgagggaccgagatgctgagatagtggtgaaggacaatggcagaagctgtcccccctgtcatgaggtttgcaaggggcgatgctggggtcctggatcagaagactgccagacattgaccaagaccatctgtgctcctcagtgtaatggtcactgctttgggcccaaccccaaccagtgctgccatgatgagtgtgccgggggctgctcaggccctcaggacacagactgctttgcctgccggcacttcaatgacagtggagcctgtgtacctcgctgtccacagcctcttgtctacaacaagctaactttccagctggaacccaatccccacaccaagtatcagtatggaggagtttgtgtagccagctgtccccataactttgtggtggatcaaacatcctgtgtcagggcctgtcctcctgacaagatggaagtagataaaaatgggctcaagatgtgtgagccttgtgggggactatgtcccaaagcctgtgagggaacaggctctgggagccgcttccagactgtggactcgagcaacattgatggatttgtgaactgcaccaagatcctgggcaacctggactttctgatcaccggcctcaatggagacccctggcacaagatccctgccctggacccagagaagctcaatgtcttccggacagtacgggagatcacaggtgagtggcagagagtttgccctttctagaagaataggtgaaccactggcataaattgcg

SEQ ID NO: 146 - protein, 403 aa, synthetic construct
  REGION 1..403: note = HER3-int10
MRANDALQVLGLLFSLARGSEVGNSQAVCPGTLNGLSVTGDAENQYQTLYKLYERCEVVMGNLEIVLTGHNADLSFLQWIREVTGYVLVAMNEFSTLPLPNLRVVRGTQVYDGKFAIFVMLNYNTNSSHALRQLRLTQLTEILSGGVYIEKNDKLCHMDTIDWRDIVRDRDAEIVVKDNGRSCPPCHEVCKGRCWGPGSEDCQTLTKTICAPQCNGHCFGPNPNQCCHDECAGGCSGPQDTDCFACRHFNDSGACVPRCPQPLVYNKLTFQLEPNPHTKYQYGGVCVASCPHNFVVDQTSCVRACPPDKMEVDKNGLKMCEPCGGLCPKACEGTGSGSRFQTVDSSNIDGFVNCTKILGNLDFLITGLNGDPWHKIPALDPEKLNVFRTVREITGEWQRVCPF

SEQ ID NO: 147 - DNA, 1387 bp, synthetic construct
  misc_feature 1..1387: note = HER3-int11
  source 1..1387: mol_type = other DNA
ctaggggcccccgggccggacttggctgggctcccttcaccctctgcggagtcatgagggcgaacgacgctctgcaggtgctgggcttgcttttcagcctggcccggggctccgaggtgggcaactctcaggcagtgtgtcctgggactctgaatggcctgagtgtgaccggcgatgctgagaaccaataccagacactgtacaagctctacgagaggtgtgaggtggtgatggggaaccttgagattgtgctcacgggacacaatgccgacctctccttcctgcagtggattcgagaagtgacaggctatgtcctcgtggccatgaatgaattctctactctaccattgcccaacctccgcgtggtgcgagggacccaggtctacgatgggaagtttgccatcttcgtcatgttgaactataacaccaactccagccacgctctgcgccagctccgcttgactcagctcaccgagattctgtcagggggtgtttatattgagaagaacgataagctttgtcacatggacacaattgactggagggacatcgtgagggaccgagatgctgagatagtggtgaaggacaatggcagaagctgtcccccctgtcatgaggtttgcaaggggcgatgctggggtcctggatcagaagactgccagacattgaccaagaccatctgtgctcctcagtgtaatggtcactgctttgggcccaaccccaaccagtgctgccatgatgagtgtgccgggggctgctcaggccctcaggacacagactgctttgcctgccggcacttcaatgacagtggagcctgtgtacctcgctgtccacagcctcttgtctacaacaagctaactttccagctggaacccaatccccacaccaagtatcagtatggaggagtttgtgtagccagctgtccccataactttgtggtggatcaaacatcctgtgtcagggcctgtcctcctgacaagatggaagtagataaaaatgggctcaagatgtgtgagccttgtgggggactatgtcccaaagcctgtgagggaacaggctctgggagccgcttccagactgtggactcgagcaacattgatggatttgtgaactgcaccaagatcctgggcaacctggactttctgatcaccggcctcaatggagacccctggcacaagatccctgccctggacccagagaagctcaatgtcttccggacagtacgggagatcacaggttacctgaacatccagtcctggccgccccacatgcacaacttcagtgttttttccaatttgacaaccattggaggcagaagcctctacaagtgagtaaagggtatggaggaaatggcatcttcaggcaatgaagcctgtgtcataggcat

SEQ ID NO: 148 - protein, 425 aa, synthetic construct [sequence omitted]

SEQ ID NO: 149 - protein, 331 aa, synthetic construct
  REGION 1..331: note = p45sHER3
MRANDALQVLGLLFSLARGSEVGNSQAVCPGTLNGLSVTGDAENQYQTLYKLYERCEVVMGNLEIVLTGHNADLSFLQWIREVTGYVLVAMNEFSTLPLPNLRVVRGTQVYDGKFAIFVMLNYNTNSSHALRQLRLTQLTEILSGGVYIEKNDKLCHMDTIDWRDIVRDRDAEIVVKDNGRSCPPCHEVCKGRCWGPGSEDCQTLTKTICAPQCNGHCFGPNPNQCCHDECAGGCSGPQDTDCFACRHFNDSGACVPRCPQPLVYNKLTFQLEPNPHTKYQYGGVCVASCPHNFVVDQTSCVRACPPDKMEVDKNGLKMCEPCGGLCPKGG

SEQ ID NO: 150 - protein, 534 aa, synthetic construct
  REGION 1..534: note = p75sHER3
MRANDALQVLGLLFSLARGSEVGNSQAVCPGTLNGLSVTGDAENQYQTLYKLYERCEVVMGNLEIVLTGHNADLSFLQWIREVTGYVLVAMNEFSTLPLPNLRVVRGTQVYDGKFAIFVMLNYNTNSSHALRQLRLTQLTEILSGGVYIEKNDKLCHMDTIDWRDIVRDRDAEIVVKDNGRSCPPCHEVCKGRCWGPGSEDCQTLTKTICAPQCNGHCFGPNPNQCCHDECAGGCSGPQDTDCFACRHFNDSGACVPRCPQPLVYNKLTFQLEPNPHTKYQYGGVCVASCPHNFVVDQTSCVRACPPDKMEVDKNGLKMCEPCGGLCPKACEGTGSGSRFQTVDSSNIDGFVNCTKILGNLDFLITGLNGDPWHKIPALDPEKLNVFRTVREITGYLNIQSWPPHMHNFSVFSNLTTIGGRSLYNRGFSLLIMKNLNVTSLGFRSLKEISAGRIYISANRQLCYHHSLNWTKVLRGPTEERLDIKHNRPRRDCGEGKGLLGGENRESGRRGLKGLFCPRRGSRVEGWNQGEGGC

SEQ ID NO: 151 - protein, 400 aa, synthetic construct
  REGION 1..400: note = p50sHER3
MRANDALQVLGLLFSLARGSEVGNSQAVCPGTLNGLSVTGDAENQYQTLYKLYERCEVVMGNLEIVLTGHNADLSFLQWIREVTGYVLVAMNEFSTLPLPNLRVVRGTQVYDGKFAIFVMLNYNTNSSHALRQLRLTQLTEILSGGVYIEKNDKLCHMDTIDWRDIVRDRDAEIVVKDNGRSCPPCHEVCKGRCWGPGSEDCQTLTKTICAPQCNGHCFGPNPNQCCHDECAGGCSGPQDTDCFACRHFNDSGACVPRCPQPLVYNKLTFQLEPNPHTKYQYGGVCVASCPHNFVVDQTSCVRACPPDKMEVDKNGLKMCEPCGGLCPKACEGTGSGSRFQTVDSSNIDGFVNCTKILGNLDFLITGLNGLEILPSLLRPQPTHPSQFISLAKTFLCGAD

SEQ ID NO: 152 - DNA, 1217 bp, synthetic construct
  misc_feature 1..1217: note = ErbB4-int9
  source 1..1217: mol_type = other DNA
aattgtcagcacgggatctgagacttccaaaaaatgaagccggcgacaggactttgggtctgggtgagccttctcgtggcggcggggaccgtccagcccagcgattctcagtcagtgtgtgcaggaacggagaataaactgagctctctctctgacctggaacagcagtaccgagccttgcgcaagtactatgaaaactgtgaggttgtcatgggcaacctggagataaccagcattgagcacaaccgggacctctccttcctgcggtctgttcgagaagtcacaggctacgtgttagtggctcttaatcagtttcgttacctgcctctggagaatttacgcattattcgtgggacaaaactttatgaggatcgatatgccttggcaatatttttaaactacagaaaagatggaaactttggacttcaagaacttggattaaagaacttgacagaaatcctaaatggtggagtctatgtagaccagaacaaattcctttgttatgcagacaccattcattggcaagatattgttcggaacccatggccttccaacttgactcttgtgtcaacaaatggtagttcaggatgtggacgttgccataagtcctgtactggccgttgctggggacccacagaaaatcattgccagactttgacaaggacggtgtgtgcagaacaatgtgacggcagatgctacggaccttacgtcagtgactgctgccatcgagaatgtgctggaggctgctcaggacctaaggacacagactgctttgcctgcatgaatttcaatgacagtggagcatgtgttactcagtgtccccaaacctttgtctacaatccaaccacctttcaactggagcacaatttcaatgcaaagtacacatatggagcattctgtgtcaagaaatgtccacataactttgtggtagattccagttcttgtgtgcgtgcctgccctagttccaagatggaagtagaagaaaatgggattaaaatgtgtaaaccttgcactgacatttgcccaaaagcttgtgatggcattggcacaggatcattgatgtcagctcagactgtggattccagtaacattgacaaattcataaactgtaccaagatcaatgggaatttgatctttctagtcactggtattcatgggtcagtattaaatttttgtgcaagttattttacaaagtgtagacaaaactgaagagattc

SEQ ID NO: 153 - protein, 391 aa, synthetic construct
  REGION 1..391: note = ErbB4-int9
MKPATGLWVWVSLLVAAGTVQPSDSQSVCAGTENKLSSLSDLEQQYRALRKYYENCEVVMGNLEITSIEHNRDLSFLRSVREVTGYVLVALNQFRYLPLENLRIIRGTKLYEDRYALAIFLNYRKDGNFGLQELGLKNLTEILNGGVYVDQNKFLCYADTIHWQDIVRNPWPSNLTLVSTNGSSGCGRCHKSCTGRCWGPTENHCQTLTRTVCAEQCDGRCYGPYVSDCCHRECAGGCSGPKDTDCFACMNFNDSGACVTQCPQTFVYNPTTFQLEHNFNAKYTYGAFCVKKCPHNFVVDSSSCVRACPSSKMEVEENGIKMCKPCTDICPKACDGIGTGSLMSAQTVDSSNIDKFINCTKINGNLIFLVTGIHGSVLNFCASYFTKCRQN

SEQ ID NO: 154 - DNA, 1351 bp, synthetic construct
  misc_feature 1..1351: note = ErbB4-int10
  source 1..1351: mol_type = other DNA
aattgtcagcacgggatctgagacttccaaaaaatgaagccggcgacaggactttgggtctgggtgagccttctcgtggcggcggggaccgtccagcccagcgattctcagtcagtgtgtgcaggaacggagaataaactgagctctctctctgacctggaacagcagtaccgagccttgcgcaagtactatgaaaactgtgaggttgtcatgggcaacctggagataaccagcattgagcacaaccgggacctctccttcctgcggtctgttcgagaagtcacaggctacgtgttagtggctcttaatcagtttcgttacctgcctctggagaatttacgcattattcgtgggacaaaactttatgaggatcgatatgccttggcaatatttttaaactacagaaaagatggaaactttggacttcaagaacttggattaaagaacttgacagaaatcctaaatggtggagtctatgtagaccagaacaaattcctttgttatgcagacaccattcattggcaagatattgttcggaacccatggccttccaacttgactcttgtgtcaacaaatggtagttcaggatgtggacgttgccataagtcctgtactggccgttgctggggacccacagaaaatcattgccagactttgacaaggacggtgtgtgcagaacaatgtgacggcagatgctacggaccttacgtcagtgactgctgccatcgagaatgtgctggaggctgctcaggacctaaggacacagactgctttgcctgcatgaatttcaatgacagtggagcatgtgttactcagtgtccccaaacctttgtctacaatccaaccacctttcaactggagcacaatttcaatgcaaagtacacatatggagcattctgtgtcaagaaatgtccacataactttgtggtagattccagttcttgtgtgcgtgcctgccctagttccaagatggaagtagaagaaaatgggattaaaatgtgtaaaccttgcactgacatttgcccaaaagcttgtgatggcattggcacaggatcattgatgtcagctcagactgtggattccagtaacattgacaaattcataaactgtaccaagatcaatgggaatttgatctttctagtcactggtattcatggggacccttacaatgcaattgaagccatagacccagagaaactgaacgtctttcggacagtcagagagataacaggtaattttttaaactgcaactgttgcgctatgaacaatataatttttttaaaaattacacaagattgactgggcatcgtggctcacaccagtaatcccagcacttagggaggttgaggcg

SEQ ID NO: 155 - protein, 421 aa, synthetic construct
  REGION 1..421: note = ErbB4-int10
MKPATGLWVWVSLLVAAGTVQPSDSQSVCAGTENKLSSLSDLEQQYRALRKYYENCEVVMGNLEITSIEHNRDLSFLRSVREVTGYVLVALNQFRYLPLENLRIIRGTKLYEDRYALAIFLNYRKDGNFGLQELGLKNLTEILNGGVYVDQNKFLCYADTIHWQDIVRNPWPSNLTLVSTNGSSGCGRCHKSCTGRCWGPTENHCQTLTRTVCAEQCDGRCYGPYVSDCCHRECAGGCSGPKDTDCFACMNFNDSGACVTQCPQTFVYNPTTFQLEHNFNAKYTYGAFCVKKCPHNFVVDSSSCVRACPSSKMEVEENGIKMCKPCTDICPKACDGIGTGSLMSAQTVDSSNIDKFINCTKINGNLIFLVTGIHGDPYNAIEAIDPEKLNVFRTVREITGNFLNCNCCAMNNIIFLKITQD

SEQ ID NO: 156 - DNA, 1356 bp, synthetic construct
  misc_feature 1..1356: note = ErbB4-int11
  source 1..1356: mol_type = other DNA
aattgtcagcacgggatctgagacttccaaaaaatgaagccggcgacaggactttgggtctgggtgagccttctcgtggcggcggggaccgtccagcccagcgattctcagtcagtgtgtgcaggaacggagaataaactgagctctctctctgacctggaacagcagtaccgagccttgcgcaagtactatgaaaactgtgaggttgtcatgggcaacctggagataaccagcattgagcacaaccgggacctctccttcctgcggtctgttcgagaagtcacaggctacgtgttagtggctcttaatcagtttcgttacctgcctctggagaatttacgcattattcgtgggacaaaactttatgaggatcgatatgccttggcaatatttttaaactacagaaaagatggaaactttggacttcaagaacttggattaaagaacttgacagaaatcctaaatggtggagtctatgtagaccagaacaaattcctttgttatgcagacaccattcattggcaagatattgttcggaacccatggccttccaacttgactcttgtgtcaacaaatggtagttcaggatgtggacgttgccataagtcctgtactggccgttgctggggacccacagaaaatcattgccagactttgacaaggacggtgtgtgcagaacaatgtgacggcagatgctacggaccttacgtcagtgactgctgccatcgagaatgtgctggaggctgctcaggacctaaggacacagactgctttgcctgcatgaatttcaatgacagtggagcatgtgttactcagtgtccccaaacctttgtctacaatccaaccacctttcaactggagcacaatttcaatgcaaagtacacatatggagcattctgtgtcaagaaatgtccacataactttgtggtagattccagttcttgtgtgcgtgcctgccctagttccaagatggaagtagaagaaaatgggattaaaatgtgtaaaccttgcactgacatttgcccaaaagcttgtgatggcattggcacaggatcattgatgtcagctcagactgtggattccagtaacattgacaaattcataaactgtaccaagatcaatgggaatttgatctttctagtcactggtattcatggggacccttacaatgcaattgaagccatagacccagagaaactgaacgtctttcggacagtcagagagataacaggtttcctgaacatacagtcatggccaccaaacatgactgacttcagtgttttttctaacctggtgaccattggtggaagagtactctataggtaagtggatatgtttaaagctgcagggctcaca

SEQ ID NO: 157 - protein, 430 aa, synthetic construct
  REGION 1..430: note = ErbB4-int11
MKPATGLWVWVSLLVAAGTVQPSDSQSVCAGTENKLSSLSDLEQQYRALRKYYENCEVVMGNLEITSIEHNRDLSFLRSVREVTGYVLVALNQFRYLPLENLRIIRGTKLYEDRYALAIFLNYRKDGNFGLQELGLKNLTEILNGGVYVDQNKFLCYADTIHWQDIVRNPWPSNLTLVSTNGSSGCGRCHKSCTGRCWGPTENHCQTLTRTVCAEQCDGRCYGPYVSDCCHRECAGGCSGPKDTDCFACMNFNDSGACVTQCPQTFVYNPTTFQLEHNFNAKYTYGAFCVKKCPHNFVVDSSSCVRACPSSKMEVEENGIKMCKPCTDICPKACDGIGTGSLMSAQTVDSSNIDKFINCTKINGNLIFLVTGIHGDPYNAIEAIDPEKLNVFRTVREITGFLNIQSWPPNMTDFSVFSNLVTIGGRVLYR

SEQ ID NO: 158 - DNA, 1582 bp, synthetic construct
  misc_feature 1..1582: note = ErbB4-int12
  source 1..1582: mol_type = other DNA
aattgtcagcacgggatctgagacttccaaaaaatgaagccggcgacaggactttgggtctgggtgagccttctcgtggcggcggggaccgtccagcccagcgattctcagtcagtgtgtgcaggaacggagaataaactgagctctctctctgacctggaacagcagtaccgagccttgcgcaagtactatgaaaactgtgaggttgtcatgggcaacctggagataaccagcattgagcacaaccgggacctctccttcctgcggtctgttcgagaagtcacaggctacgtgttagtggctcttaatcagtttcgttacctgcctctggagaatttacgcattattcgtgggacaaaactttatgaggatcgatatgccttggcaatatttttaaactacagaaaagatggaaactttggacttcaagaacttggattaaagaacttgacagaaatcctaaatggtggagtctatgtagaccagaacaaattcctttgttatgcagacaccattcattggcaagatattgttcggaacccatggccttccaacttgactcttgtgtcaacaaatggtagttcaggatgtggacgttgccataagtcctgtactggccgttgctggggacccacagaaaatcattgccagactttgacaaggacggtgtgtgcagaacaatgtgacggcagatgctacggaccttacgtcagtgactgctgccatcgagaatgtgctggaggctgctcaggacctaaggacacagactgctttgcctgcatgaatttcaatgacagtggagcatgtgttactcagtgtccccaaacctttgtctacaatccaaccacctttcaactggagcacaatttcaatgcaaagtacacatatggagcattctgtgtcaagaaatgtccacataactttgtggtagattccagttcttgtgtgcgtgcctgccctagttccaagatggaagtagaagaaaatgggattaaaatgtgtaaaccttgcactgacatttgcccaaaagcttgtgatggcattggcacaggatcattgatgtcagctcagactgtggattccagtaacattgacaaattcataaactgtaccaagatcaatgggaatttgatctttctagtcactggtattcatggggacccttacaatgcaattgaagccatagacccagagaaactgaacgtctttcggacagtcagagagataacaggtttcctgaacatacagtcatggccaccaaacatgactgacttcagtgttttttctaacctggtgaccattggtggaagagtactctatagtggcctgtccttgcttatcctcaagcaacagggcatcacctctctacagttccagtccctgaaggaaatcagcgcaggaaacatctatattactgacaacagcaacctgtgttattatcataccattaactggacaacactcttcagcacaatcaaccagagaatagtaatccgggacaacagaaaagctgaaaattgtagtaagtacattactcagacatttaaaacatagaaacttaaattttttcccattcttcttt

SEQ ID NO: 159 - protein, 506 aa, synthetic construct [sequence omitted]

SEQ ID NO: 160 - DNA, 3851 bp, synthetic construct
  misc_feature 1..3851: note = pDrive Cloning vector
  source 1..3851: mol_type = other DNA
gcgcccaatacgcaaaccgcctctccccgcgcgttggccgattcattaatgcagctggcacgacaggtttcccgactggaaagcgggcagtgagcgcaacgcaattaatgtgagttagctcactcattaggcaccccaggctttacactttatgcttccggctcgtatgttgtgtggaattgtgagcggataacaatttcacacaggaaacagctatgaccatgattacgccaagctctaatacgactcactatagggaaagctcggtaccacgcatgctgcagacgcgttacgtatcggatccagaattcgtgatatctgaattcgtcgacaagcttctcgagcctaggctagctctagaccacacgtgtgggggcccgagctcgcggccgctgtattctatagtgtcacctaaatggccgcacaattcactggccgtcgttttacaacgtcgtgactgggaaaaccctggcgttacccaacttaatcgccttgcagcacatccccctttcgccagctggcgtaatagcgaagaggcccgcaccgatcgcccttcccaacagttgcgcagcctgaatggcgaatggaaattgtaagcgttaatattttgttaaaattcgcgttaaatttttgttaaatcagctcattttttaaccaataggccgaaatcggcaaaatcccttataaatcaaaagaatagaccgagatagggttgagtgttgttccagtttggaacaagagtccactattaaagaacgtggactccaacgtcaaagggcgaaaaaccgtctatcagggcgatggcccactacgtgaaccatcaccctaatcaagttttttggggtcgaggtgccgtaaagcactaaatcggaaccctaaagggagcccccgatttagagcttgacggggaaagccggcgaacgtggcgagaaaggaagggaagaaagcgaaaggagcgggcgctagggcgctggcaagtgtagcggtcacgctgcgcgtaaccaccacacccgccgcgcttaatgcgccgctacagggcgcgtcaggtggcacttttcggggaaatgtgcgcggaacccctatttgtttatttttctaaatacattcaaatatgtatccgctcatgagacaataaccctgataaatgcttcaataatattgaaaaaggaagagtatgagtattcaacatttccgtgtcgcccttattcccttttttgcggcattttgccttcctgtttttgctcacccagaaacgctggtgaaagtaaaagatgctgaagatcagttgggtgcacgagtgggttacatcgaactggatctcaacagcggtaagatccttgagagttttcgccccgaagaacgttttccaatgatgagcacttttaaagttctgctatgtggcgcggtattatcccgtattgacgccgggcaagagcaactcggtcgccgcatacactattctcagaatgacttggttgagtactcaccagtcacagaaaagcatcttacggatggcatgacagtaagagaattatgcagtgctgccataaccatgagtgataacactgcggccaacttacttctgacaacgatcggaggaccgaaggagctaaccgcttttttgcacaacatgggggatcatgtaactcgccttgatcgttgggaaccggagctgaatgaagccataccaaacgacgagcgtgacaccacgatgcctgtagcaatggcaacaacgttgcgcaaactattaactggcgaactacttactctagcttcccggcaacaattaatagactggatggaggcggataaagttgcaggaccacttctgcgctcggcccttccggctggctggtttattgctgataaatctggagccggtgagcgtgggtctcgcggtatcattgcagcactggggccagatggtaagccctcccgtatcgtagttatctacacgacggggagtcaggcaactatggatgaacgaaatagacagatcgctgagataggtgcctcactgattaagcattggtaactgtcagaccaagtttactcatatatactttagattgatttaaaacttcatttttaatttaaaaggatctaggtgaagatcctttttgataatctcatgaacaataaaactgtctgcttacataaacagtaatacaaggggtgttatgagccatattcaacgggaaacgtcttgctctaggccgcgattaaattccaacatggatgctgatttatatgggtataaatgggctcgcgataatgtcgggcaatcaggtgcgacaatctatcgattgtatgggaagcccgatgcgccagagttgtttctgaaacatggcaaaggtagcgttgccaatgatgttacagatgagatggtcagactaaactggctgacggaatttatgcctcttccgaccatcaagcattttatccgtactcctgatgatgcatggttactcaccactgcgatccccgggaaaacagcattccaggtattagaagaatatcctgattcaggtgaaaatattgttgatgcgctggcagtgttcctgcgccggttgcattcgattcctgtttgtaattgtccttttaacagcgatcgcgtatttcgtctcgctcaggcgcaatcacgaatgaataacggtttggttgatgcgagtgattttgatgacgagcgtaatggctggcctgttgaacaagtctggaaagaaatgcataaacttttgccattctcaccggattcagtcgtcactcatggtgatttctcacttgataaccttatttttgacgaggggaaattaataggttgtattgatgttggacgagtcggaatcgcagaccgataccaggatcttgccatcctatggaactgcctcggtgagttttctccttcattacagaaacggctttttcaaaaatatggtattgataatcctgatatgaataaattgcagtttcatttgatgctcgatgagtttttctaagaattaattcatgaccaaaatcccttaacgtgagttttcgttccactgagcgtcagaccccgtagaaaagatcaaaggatcttcttgagatcctttttttctgcgcgtaatctgctgcttgcaaacaaaaaaaccaccgctaccagcggtggtttgtttgccggatcaagagctaccaactctttttccgaaggtaactggcttcagcagagcgcagataccaaatactgtccttctagtgtagccgtagttaggccaccacttcaagaactctgtagcaccgcctacatacctcgctctgctaatcctgttaccagtggctgctgccagtggcgataagtcgtgtcttaccgggttggactcaagacgatagttaccggataaggcgcagcggtcgggctgaacggggggttcgtgcacacagcccagcttggagcgaacgacctacaccgaactgagatacctacagcgtgagctatgagaaagcgccacgcttcccgaagggagaaaggcggacaggtatccggtaagcggcagggtcggaacaggagagcgcacgagggagcttccagggggaaacgcctggtatctttatagtcctgtcgggtttcgccacctctgacttgagcgtcgatttttgtgatgctcgtcaggggggcggagcctatggaaaaacgccagcaacgcggcctttttacggttcctggccttttgctggccttttgctcacatgttctttcctgcgttatcccctgattctgtggataaccgtattaccgcctttgagtgagctgataccgctcgccgcagccgaacgaccgagcgcagcgagtcagtgagcgaggaagcggaaga

SEQ ID NO: 161 - DNA, 5493 bp, synthetic construct
  misc_feature 1..5493: note = pcDNA3.1/myc-His
  source 1..5493: mol_type = other DNA
gacggatcgggagatctcccgatcccctatggtgcactctcagtacaatctgctctgatgccgcatagttaagccagtatctgctccctgcttgtgtgttggaggtcgctgagtagtgcgcgagcaaaatttaagctacaacaaggcaaggcttgaccgacaattgcatgaagaatctgcttagggttaggcgttttgcgctgcttcgcgatgtacgggccagatatacgcgttgacattgattattgactagttattaatagtaatcaattacggggtcattagttcatagcccatatatggagttccgcgttacataacttacggtaaatggcccgcctggctgaccgcccaacgacccccgcccattgacgtcaataatgacgtatgttcccatagtaacgccaatagggactttccattgacgtcaatgggtggagtatttacggtaaactgcccacttggcagtacatcaagtgtatcatatgccaagtacgccccctattgacgtcaatgacggtaaatggcccgcctggcattatgcccagtacatgaccttatgggactttcctacttggcagtacatctacgtattagtcatcgctattaccatggtgatgcggttttggcagtacatcaatgggcgtggatagcggtttgactcacggggatttccaagtctccaccccattgacgtcaatgggagtttgttttggcaccaaaatcaacgggactttccaaaatgtcgtaacaactccgccccattgacgcaaatgggcggtaggcgtgtacggtgggaggtctatataagcagagctctctggctaactagagaacccactgcttactggcttatcgaaattaatacgactcactatagggagacccaagctggctagttaagcttggtaccgagctcggatccactagtccagtgtggtggaattctgcagatatccagcacagtggcggccgctcgagtctagagggcccttcgaacaaaaactcatctcagaagaggatctgaatatgcataccggtcatcatcaccatcaccattgagtttaaacccgctgatcagcctcgactgtgccttctagttgccagccatctgttgtttgcccctcccccgtgccttccttgaccctggaaggtgccactcccactgtcctttcctaataaaatgaggaaattgcatcgcattgtctgagtaggtgtcattctattctggggggtggggtggggcaggacagcaagggggaggattgggaagacaatagcaggcatgctggggatgcggtgggctctatggcttctgaggcggaaagaaccagctggggctctagggggtatccccacgcgccctgtagcggcgcattaagcgcggcgggtgtggtggttacgcgcagcgtgaccgctacacttgccagcgccctagcgcccgctcctttcgctttcttcccttcctttctcgccacgttcgccggctttccccgtcaagctctaaatcgggggctccctttagggttccgatttagtgctttacggcacctcgaccccaaaaaacttgattagggtgatggttcacgtagtgggccatcgccctgatagacggtttttcgccctttgacgttggagtccacgttctttaatagtggactcttgttccaaactggaacaacactcaaccctatctcggtctattcttttgatttataagggattttgccgatttcggcctattggttaaaaaatgagctgatttaacaaaaatttaacgcgaattaattctgtggaatgtgtgtcagttagggtgtggaaagtccccaggctccccagcaggcagaagtatgcaaagcatgcatctcaattagtcagcaaccaggtgtggaaagtccccaggctccccagcaggcagaagtatgcaaagcatgcatctcaattagtcagcaaccatagtcccgcccctaactccgcccatcccgcccctaactccgcccagttccgcccattctccgccccatggctgactaattttttttatttatgcagaggccgaggccgcctctgcctctgagctattccagaagtagtgaggaggcttttttggaggcctaggcttttgcaaaaagctcccgggagcttgtatatccattttcggatctgatcaagagacaggatgaggatcgtttcgcatgattgaacaagatggattgcacgcaggttctccggccgcttgggtggagaggctattcggctatgactgggcacaacagacaatcggctgctctgatgccgccgtgttccggctgtcagcgcaggggcgcccggttctttttgtcaagaccgacctgtccggtgccctgaatgaactgcaggacgaggcagcgcggctatcgtggctggccacgacgggcgttccttgcgcagctgtgctcgacgttgtcactgaagcgggaagggactggctgctattgggcgaagtgccggggcaggatctcctgtcatctcaccttgctcctgccgagaaagtatccatcatggctgatgcaatgcggcggctgcatacgcttgatccggctacctgcccattcgaccaccaagcgaaacatcgcatcgagcgagcacgtactcggatggaagccggtcttgtcgatcaggatgatctggacgaagagcatcaggggctcgcgccagccgaactgttcgccaggctcaaggcgcgcatgcccgacggcgaggatctcgtcgtgacccatggcgatgcctgcttgccgaatatcatggtggaaaatggccgcttttctggattcatcgactgtggccggctgggtgtggcggaccgctatcaggacatagcgttggctacccgtgatattgctgaagagcttggcggcgaatgggctgaccgcttcctcgtgctttacggtatcgccgctcccgattcgcagcgcatcgccttctatcgccttcttgacgagttcttctgagcgggactctggggttcgcgaaatgaccgaccaagcgacgcccaacctgccatcacgagatttcgattccaccgccgccttctatgaaaggttgggcttcggaatcgttttccgggacgccggctggatgatcctccagcgcggggatctcatgctggagttcttcgcccaccccaacttgtttattgcagcttataatggttacaaataaagcaatagcatcacaaatttcacaaataaagcatttttttcactgcattctagttgtggtttgtccaaactcatcaatgtatcttatcatgtctgtataccgtcgacctctagctagagcttggcgtaatcatggtcatagctgtttcctgtgtgaaattgttatccgctcacaattccacacaacatacgagccggaagcataaagtgtaaagcctggggtgcctaatgagtgagctaactcacattaattgcgttgcgctcactgcccgctttccagtcgggaaacctgtcgtgccagctgcattaatgaatcggccaacgcgcggggagaggcggtttgcgtattgggcgctcttccgcttcctcgctcactgactcgctgcgctcggtcgttcggctgcggcgagcggtatcagctcactcaaaggcggtaatacggttatccacagaatcaggggataacgcaggaaagaacatgtgagcaaaaggccagcaaaaggccaggaaccgtaaaaaggccgcgttgctggcgtttttccataggctccgcccccctgacgagcatcacaaaaatcgacgctcaagtcagaggtggcgaaacccgacaggactataaagataccaggcgtttccccctggaagctccctcgtgcgctctcctgttccgaccctgccgcttaccggatacctgtccgcctttctcccttcgggaagcgtggcgctttctcatagctcacgctgtaggtatctcagttcggtgtaggtcgttcgctccaagctgggctgtgtgcacgaaccccccgttcagcccgaccgctgcgccttatccggtaactatcgtcttgagtccaacccggtaagacacgacttatcgccactggcagcagccactggtaacaggattagcagagcgaggtatgtaggcggtgctacagagttcttgaagtggtggcctaactacggctacactagaagaacagtatttggtatctgcgctctgctgaagccagttaccttcggaaaaagagttggtagctcttgatccggcaaacaaaccaccgctggtagcggtggtttttttgtttgcaagcagcagattacgcgcagaaaaaaaggatctcaagaagatcctttgatcttttctacggggtctgacgctcagtggaacgaaaactcacgttaagggattttggtcatgagattatcaaaaaggatcttcacctagatccttttaaattaaaaatgaagttttaaatcaatctaaagtatatatgagtaaacttggtctgacagttaccaatgcttaatcagtgaggcacctatctcagcgatctgtctatttcgttcatccatagttgcctgactccccgtcgtgtagataactacgatacgggagggcttaccatctggccccagtgctgcaatgataccgcgagacccacgctcaccggctccagatttatcagcaataaaccagccagccggaagggccgagcgcagaagtggtcctgcaactttatccgcctccatccagtctattaattgttgccgggaagctagagtaagtagttcgccagttaatagtttgcgcaacgttgttgccattgctacaggcatcgtggtgtcacgctcgtcgtttggtatggcttcattcagctccggttcccaacgatcaaggcgagttacatgatcccccatgttgtgcaaaaaagcggttagctccttcggtcctccgatcgttgtcagaagtaagttggccgcagtgttatcactcatggttatggcagcactgcataattctcttactgtcatgccatccgtaagatgcttttctgtgactggtgagtactcaaccaagtcattctgagaatagtgtatgcggcgaccgagttgctcttgcccggcgtcaatacgggataataccgcgccacatagcagaactttaaaagtgctcatcattggaaaacgttcttcggggcgaaaactctcaaggatcttaccgctgttgagatccagttcgatgtaacccactcgtgcacccaactgatcttcagcatcttttactttcaccagcgtttctgggtgagcaaaaacaggaaggcaaaatgccgcaaaaaagggaataagggcgacacggaaatgttgaatactcatactcttcctttttcaatattattgaagcatttatcagggttattgtctcatgagcggatacatatttgaatgtatttagaaaaataaacaaataggggttccgcgcacatttccccgaaaagtgccacctgacgtc

SEQ ID NO: 162 - protein, 28 aa, synthetic construct
  source 1..28: note = tag
LESRGPFEQKLISEEDLNMHTGHHHHHH

SEQ ID NO: 163 - protein, 330 aa, Homo sapiens [sequence omitted]

SEQ ID NO: 164 - protein, 326 aa, Homo sapiens
  REGION 1..326: note = hIgG2 heavy chain constant
ASTKGPSVFPLAPCSRSTSESTAALGCLVKDYFPEPVTVSWNSGALTSGVHTFPAVLQSSGLYSLSSVVTVPSSNFGTQTYTCNVDHKPSNTKVDKTVERKCCVECPPCPAPPVAGPSVFLFPPKPKDTLMISRTPEVTCVVVDVSHEDPEVQFNWYVDGVEVHNAKTKPREEQFNSTFRVVSVLTVVHQDWLNGKEYKCKVSNKGLPAPIEKTISKTKGQPREPQVYTLPPSREEMTKNQVSLTCLVKGFYPSDIAVEWESNGQPENNYKTTPPMLDSDGSFFLYSKLTVDKSRWQQGNVFSCSVMHEALHNHYTQKSLSLSPGK

SEQ ID NO: 165 - protein, 377 aa, Homo sapiens
  REGION 1..377: note = hIgG3 heavy chain constant
ASTKGPSVFPLAPCSRSTSGGTAALGCLVKDYFPEPVTVSWNSGALTSGVHTFPAVLQSSGLYSLSSVVTVPSSSLGTQTYTCNVNHKPSNTKVDKRVELKTPLGDTTHTCPRCPEPKSCDTPPPCPRCPEPKSCDTPPPCPRCPEPKSCDTPPPCPRCPAPELLGGPSVFLFPPKPKDTLMISRTPEVTCVVVDVSHEDPEVQFKWYVDGVEVHNAKTKPREEQYNSTFRVVSVLTVLHQDWLNGKEYKCKVSNKALPAPIEKTISKTKGQPREPQVYTLPPSREEMTKNQVSLTCLVKGFYPSDIAVEWESSGQPENNYNTTPPMLDSDGSFFLYSKLTVDKSRWQQGNIFSCSVMHEALHNRFTQKSLSLSPGK

SEQ ID NO: 166 - protein, 327 aa, Homo sapiens
  REGION 1..327: note = hIgG4 heavy chain constant
ASTKGPSVFPLAPCSRSTSESTAALGCLVKDYFPEPVTVSWNSGALTSGVHTFPAVLQSSGLYSLSSVVTVPSSSLGTKTYTCNVDHKPSNTKVDKRVESKYGPPCPSCPAPEFLGGPSVFLFPPKPKDTLMISRTPEVTCVVVDVSQEDPEVQFNWYVDGVEVHNAKTKPREEQFNSTYRVVSVLTVLHQDWLNGKEYKCKVSNKGLPSSIEKTISKAKGQPREPQVYTLPPSQEEMTKNQVSLTCLVKGFYPSDIAVEWESNGQPENNYKTTPPVLDSDGSFFLYSRLTVDKSRWQEGNVFSCSVMHEALHNHYTQKSLSLSLGK

SEQ ID NO: 167 - protein, 231 aa, synthetic construct
  REGION 1..231: note = hIgG1 Fc
PKSCDKTHTCPPCPAPELLGGPSVFLFPPKPKDTLMISRTPEVTCVVVDVSHEDPEVKFNWYVDGVEVHNAKTKPREEQYNSTYRVVSVLTVLHQDWLNGKEYKCKVSNKALPAPIEKTISKAKGQPREPQVYTLPPSREEMTKNQVSLTCLVKGFYPSDIAVEWESNGQPENNYKTTPPVLDSDGSFFLYSKLTVDKSRWQQGNVFSCSVMHEALHNHYTQKSLSLSPGK

SEQ ID NO: 168 - protein, 232 aa, synthetic construct
  REGION 1..232: note = hIgG1 Fc
EPRSCDKTHTCPPCPAPELLGGPSVFLFPPKPKDTLMISRTPEVTCVVVDVSHEDPEVKFNWYVDGVEVHNAKTKPREEQYNSTYRVVSVLTVLHQDWLNGKDYKCKVSNKALPAPMQKTISKAKGQPREPQVYTLPPSRDELTKNQVSLTCLVKGFYPRHIAVEWESNGQPENNYKTTPPVLDSDGSFFLYSKLTVDKSRWQQGNVFSCSVMHEALHNHYTQKSLSLSPGK

SEQ ID NO: 169 - protein, 232 aa, synthetic construct
  REGION 1..232: note = hIgG1 Fc mutein
EPRSCDKTHTCPPCPAPEAEGAPSVFLFPPKPKDTLMISRTPEVTCVVVDVSHEDPEVKFNWYVDGVEVHNAKTKPREEQYNSTYRVVSVLTVLHQDWLNGKDYKCKVSNKALPAPMQKTISKAKGQPREPQVYTLPPSRDELTKNQVSLTCLVKGFYPRHIAVEWESNGQPENNYKTTPPVLDSDGSFFLYSKLTVDKSRWQQGNVFSCSVMHEALHNHYTQKSLSLSPGK

SEQ ID NO: 170 - protein, 39 aa, synthetic construct
  REGION 1..39: note = c-jun leucine zipper
RIARLEEKVKTLKAQNSELASTANMLREQVAQLKQKVMN

SEQ ID NO: 171 - protein, 39 aa, synthetic construct
  REGION 1..39: note = c-fos leucine zipper
LTDTLQAETDQLEDEKSALQTEIANLLKEKEKLEFILAA

SEQ ID NO: 172 - protein, 43 aa, synthetic construct
  REGION 1..43: note = modified c-jun leucine zipper
CGGRIARLEEKVKTLKAQNSELASTANMLREQVAQLKQKVMNY

SEQ ID NO: 173 - protein, 43 aa, synthetic construct
  REGION 1..43: note = modified c-fos leucine zipper
CGGLTDTLQAETDQLEDEKSALQTEIANLLKEKEKLEFILAAY

SEQ ID NO: 174 - protein, 5 aa, synthetic construct
  REGION 1..5: note = linker
GGGGS

SEQ ID NO: 175 - protein, 12 aa, synthetic construct
  REGION 1..12: note = linker
GKSSGSGSESKS

SEQ ID NO: 176 - protein, 15 aa, synthetic construct
  REGION 1..15: note = linker
GGSTSGSGKSSEGKG

SEQ ID NO: 177 - protein, 19 aa, synthetic construct
  REGION 1..19: note = linker
GSTSGSGKSSSEGSGSTKG

SEQ ID NO: 178 - protein, 18 aa, synthetic construct
  REGION 1..18: note = linker
GSTSGSGKPGSGEGSTKG

SEQ ID NO: 179 - protein, 14 aa, synthetic construct
  REGION 1..14: note = linker
EGKSSGSGSESKEF

SEQ ID NO: 180 - protein, 33 aa, synthetic construct
  REGION 1..33: note = GCN4 leucine zipper
RMKQLEDKVEELLSKNYHLENEVARLKKLVGER

SEQ ID NO: 181 - protein, 33 aa, synthetic construct
  REGION 1..33: note = GCN4 leucine zipper- trimer
RMKQIEDKIEEILSKIYHIENEIARIKKLIGER

SEQ ID NO: 182 - protein, 33 aa, synthetic construct
  REGION 1..33: note = GCN4 leucine zipper- tetramer
RMKQIEDKLEEILSKLYHIENELARIKKLLGER

SEQ ID NO: 183 - protein, 44 aa, synthetic construct
  REGION 1..44: note = R subunit
SHIQIPPGLTELLQGYTVEVLRQQPPDLVEFAVEYFTRLREARA

SEQ ID NO: 184 - protein, 17 aa, synthetic construct
  REGION 1..17: note = AD
QIEYLAKQIVDNAIQQA

SEQ ID NO: 185 - protein, 45 aa, synthetic construct
  REGION 1..45: note = modified R subunit
CSHIQIPPGLTELLQGYTVEVLRQQPPDLVEFAVEYFTRLREARA

SEQ ID NO: 186 - protein, 21 aa, synthetic construct
  REGION 1..21: note = modified AD subunit
CGQIEYLAKQIVDNAIQQAGC

SEQ ID NO: 187 - protein, 5 aa, synthetic construct
  REGION 1..5: note = linker
SSSSG

SEQ ID NO: 188 - protein, 4 aa, synthetic construct
  REGION 1..4: note = linker
AAPA

SEQ ID NO: 189 - DNA, 27 bp, synthetic construct
  misc_feature 1..27: note = encoding Gly4Ser with NcoI ends
  source 1..27: mol_type = other DNA
ccatgggcggcggcggctctgccatgg

SEQ ID NO: 190 - DNA, 42 bp, synthetic construct
  misc_feature 1..42: note = encoding (Gly4Ser)2 with NcoI ends
  source 1..42: mol_type = other DNA
ccatgggcggcggcggctctggcggcggcggctctgccatgg

SEQ ID NO: 191 - DNA, 75 bp, synthetic construct
  misc_feature 1..75: note = encoding (Ser4Gly)4 with NcoI ends
  source 1..75: mol_type = other DNA
ccatggcctcgtcgtcgtcgggctcgtcgtcgtcgggctcgtcgtcgtcgggctcgtcgtcgtcgggcgccatgg

SEQ ID NO: 192 - DNA, 45 bp, synthetic construct
  misc_feature 1..45: note = encoding (Ser4Gly)2 with NcoI ends
  source 1..45: mol_type = other DNA
ccatggcctcgtcgtcgtcgggctcgtcgtcgtcgggcgccatgg

SEQ ID NO: 193 - DNA, 3985 bp, Homo sapiens
  misc_feature 1..3985: note = CSF1R
  source 1..3985: mol_type = genomic DNA
gaagggcagacagagtgtccaaaagcgtgagagcacgaagtgaggagaaggtggagaagagagaagaggaagaggaagaggaagagaggaagcggagggaactgcggccaggctaaaaggggaagaagaggatcagcccaaggaggaggaagaggaaaacaagacaaacagccagtgcagaggagaggaacgtgtgtccagtgtcccgatccctgcggagctagtagctgagagctctgtgccctgggcaccttgcagccctgcacctgcctgccacttccccaccgaggccatgggcccaggagttctgctgctcctgctggtggccacagcttggcatggtcagggaatcccagtgatagagcccagtgtccctgagctggtcgtgaagccaggagcaacggtgaccttgcgatgtgtgggcaatggcagcgtggaatgggatggccccccatcacctcactggaccctgtactctgatggctccagcagcatcctcagcaccaacaacgctaccttccaaaacacggggacctatcgctgcactgagcctggagaccccctgggaggcagcgccgccatccacctctatgtcaaagaccctgcccggccctggaacgtgctagcacaggaggtggtcgtgttcgaggaccaggacgcactactgccctgtctgctcacagacccggtgctggaagcaggcgtctcgctggtgcgtgtgcgtggccggcccctcatgcgccacaccaactactccttctcgccctggcatggcttcaccatccacagggccaagttcattcagagccaggactatcaatgcagtgccctgatgggtggcaggaaggtgatgtccatcagcatccggctgaaagtgcagaaagtcatcccagggcccccagccttgacactggtgcctgcagagctggtgcggattcgaggggaggctgcccagatcgtgtgctcagccagcagcgttgatgttaactttgatgtcttcctccaacacaacaacaccaagctcgcaatccctcaacaatctgactttcataataaccgttaccaaaaagtcctgaccctcaacctcgatcaagtagatttccaacatgccggcaactactcctgcgtggccagcaacgtgcagggcaagcactccacctccatgttcttccgggtggtagagagtgcctacttgaacttgagctctgagcagaacctcatccaggaggtgaccgtgggggaggggctcaacctcaaagtcatggtggaggcctacccaggcctgcaaggttttaactggacctacctgggacccttttctgaccaccagcctgagcccaagcttgctaatgctaccaccaaggacacatacaggcacaccttcaccctctctctgccccgcctgaagccctctgaggctggccgctactccttcctggccagaaacccaggaggctggagagctctgacgtttgagctcacccttcgataccccccagaggtaagcgtcatatggacattcatcaacggctctggcacccttttgtgtgctgcctctgggtacccccagcccaacgtgacatggctgcagtgcagtggccacactgataggtgtgatgaggcccaagtgctgcaggtctgggatgacccataccctgaggtcctgagccaggagcccttccacaaggtgacggtgcagagcctgctgactgttgagaccttagagcacaaccaaacctacgagtgcagggcccacaacagcgtggggagtggctcctgggccttcatacccatctctgcaggagcccacacgcatcccccggatgagttcctcttcacaccagtggtggtcgcctgcatgtccatcatggccttgctgctgctgctgctcctgctgctattgtacaagtataagcagaagcccaagtaccaggtccgctggaagatcatcgagagctatgagggcaacagttatactttcatcgaccccacgcagctgccttacaacgagaagtgggagttcccccggaacaacctgcagtttggtaagaccctcggagctggagcctttgggaaggtggtggaggccacggcctttggtctgggcaaggaggatgctgtcctgaaggtggctgtgaagatgctgaagtccacggcccatgctgatgagaaggaggccctcatgtccgagctgaagatcatgagccacctgggccagcacgagaacatcgtcaaccttctgggagcctgtacccatggaggccctgtactggtcatcacggagtactgttgctatggcgacctgctcaactttctgcgaaggaaggctgaggccatgctgggacccagcctgagccccggccaggaccccgagggaggcgtcgactataagaacatccacctcgagaagaaatatgtccgcagggacagtggcttctccagccagggtgtggacacctatgtggagatgaggcctgtctccacttcttcaaatgactccttctctgagcaagacctggacaaggaggatggacggcccctggagctccgggacctgcttcacttctccagccaagtagcccagggcatggccttcctcgcttccaagaattgcatccaccgggacgtggcagcgcgtaacgtgctgttgaccaatggtcatgtggccaagattggggacttcgggctggctagggacatcatgaatgactccaactacattgtcaagggcaatgcccgcctgcctgtgaagtggatggccccagagagcatctttgactgtgtctacacggttcagagcgacgtctggtcctatggcatcctcctctgggagatcttctcacttgggctgaatccctaccctggcatcctggtgaacagcaagttctataaactggtgaaggatggataccaaatggcccagcctgcatttgccccaaagaatatatacagcatcatgcaggcctgctgggccttggagcccacccacagacccaccttccagcagatctgctccttccttcaggagcaggcccaagaggacaggagagagcgggactataccaatctgccgagcagcagcagaagcggtggcagcggcagcagcagcagtgagctggaggaggagagctctagtgagcacctgacctgctgcgagcaaggggatatcgcccagcccttgctgcagcccaacaactatcagttctgctgaggagttgacgacagggagtaccactctcccctcctccaaacttcaactcctccatggatggggcgacacggggagaacatacaaactctgccttcggtcatttcactcaacagctcggcccagctctgaaacttgggaaggtgagggattcaggggaggtcagaggatcccacttcctgagcatgggccatcactgccagtcaggggctgggggctgagccctcacccccccctcccctactgttctcatggtgttggcctcgtgtttgctatgccaactagtagaaccttctttcctaatccccttatcttcatggaaatggactgactttatgcctatgaagtccccaggagctacactgatactgagaaaaccaggctctttggggctagacagactggcagagagtgagatctccctctctgagaggagcagcagatgctcacagaccacactcagctcaggccccttggagcaggatggctcctctaagaatctcacaggacctcttagtctctgccctatacgccgccttcactccacagcctcacccctcccacccccatactggtactgctgtaatgagccaagtggcagctaaaagttgggggtgttctgcccagtcccgtcattctgggctagaaggcaggggaccttggcatgtggctggccacaccaagcaggaagcacaaactcccccaagctgactcatcctaactaacagtcacgccgtgggatgtctctgtccacattaaactaacagcattaatgca

SEQ ID NO: 194 - protein, 972 aa, Homo sapiens
  REGION 1..972: note = CSF1R
MGPGVLLLLLVATAWHGQGIPVIEPSVPELVVKPGATVTLRCVGNGSVEWDGPPSPHWTLYSDGSSSILSTNNATFQNTGTYRCTEPGDPLGGSAAIHLYVKDPARPWNVLAQEVVVFEDQDALLPCLLTDPVLEAGVSLVRVRGRPLMRHTNYSFSPWHGFTIHRAKFIQSQDYQCSALMGGRKVMSISIRLKVQKVIPGPPALTLVPAELVRIRGEAAQIVCSASSVDVNFDVFLQHNNTKLAIPQQSDFHNNRYQKVLTLNLDQVDFQHAGNYSCVASNVQGKHSTSMFFRVVESAYLNLSSEQNLIQEVTVGEGLNLKVMVEAYPGLQGFNWTYLGPFSDHQPEPKLANATTKDTYRHTFTLSLPRLKPSEAGRYSFLARNPGGWRALTFELTLRYPPEVSVIWTFINGSGTLLCAASGYPQPNVTWLQCSGHTDRCDEAQVLQVWDDPYPEVLSQEPFHKVTVQSLLTVETLEHNQTYECRAHNSVGSGSWAFIPISAGAHTHPPDEFLFTPVVVACMSIMALLLLLLLLLLYKYKQKPKYQVRWKIIESYEGNSYTFIDPTQLPYNEKWEFPRNNLQFGKTLGAGAFGKVVEATAFGLGKEDAVLKVAVKMLKSTAHADEKEALMSELKIMSHLGQHENIVNLLGACTHGGPVLVITEYCCYGDLLNFLRRKAEAMLGPSLSPGQDPEGGVDYKNIHLEKKYVRRDSGFSSQGVDTYVEMRPVSTSSNDSFSEQDLDKEDGRPLELRDLLHFSSQVAQGMAFLASKNCIHRDVAARNVLLTNGHVAKIGDFGLARDIMNDSNYIVKGNARLPVKWMAPESIFDCVYTVQSDVWSYGILLWEIFSLGLNPYPGILVNSKFYKLVKDGYQMAQPAFAPKNIYSIMQACWALEPTHRPTFQQICSFLQEQAQEDRRERDYTNLPSSSRSGGSGSSSSELEEESSSEHLTCCEQGDIAQPLLQPNNYQFC

SEQ ID NO: 195 - DNA, 3475 bp, Homo sapiens
  misc_feature 1..3475: note = Flt3
  source 1..3475: mol_type = genomic DNA
cgaggcggcatccgagggctgggccggcgccctgggggaccccgggctccggaggccatgccggcgttggcgcgcgacgcgggcaccgtgccgctgctcgttgttttttctgcaatgatatttgggactattacaaatcaagatctgcctgtgatcaagtgtgttttaatcaatcataagaacaatgattcatcagtggggaagtcatcatcatatcccatggtatcagaatccccggaagacctcgggtgtgcgttgagaccccagagctcagggacagtgtacgaagctgccgctgtggaagtggatgtatctgcttccatcacactgcaagtgctggtcgatgccccagggaacatttcctgtctctgggtctttaagcacagctccctgaattgccagccacattttgatttacaaaacagaggagttgtttccatggtcattttgaaaatgacagaaacccaagctggagaatacctactttttattcagagtgaagctaccaattacacaatattgtttacagtgagtataagaaataccctgctttacacattaagaagaccttactttagaaaaatggaaaaccaggacgccctggtctgcatatctgagagcgttccagagccgatcgtggaatgggtgctttgcgattcacagggggaaagctgtaaagaagaaagtccagctgttgttaaaaaggaggaaaaagtgcttcatgaattatttgggacggacataaggtgctgtgccagaaatgaactgggcagggaatgcaccaggctgttcacaatagatctaaatcaaactcctcagaccacattgccacaattatttcttaaagtaggggaacccttatggataaggtgcaaagctgttcatgtgaaccatggattcgggctcacctgggaattagaaaacaaagcactcgaggagggcaactactttgagatgagtacctattcaacaaacagaactatgatacggattctgtttgcttttgtatcatcagtggcaagaaacgacaccggatactacacttgttcctcttcaaagcatcccagtcaatcagctttggttaccatcgtaggaaagggatttataaatgctaccaattcaagtgaagattatgaaattgaccaatatgaagagttttgtttttctgtcaggtttaaagcctacccacaaatcagatgtacgtggaccttctctcgaaaatcatttccttgtgagcaaaagggtcttgataacggatacagcatatccaagttttgcaatcataagcaccagccaggagaatatatattccatgcagaaaatgatgatgcccaatttaccaaaatgttcacgctgaatataagaaggaaacctcaagtgctcgcagaagcatcggcaagtcaggcgtcctgtttctcggatggatacccattaccatcttggacctggaagaagtgttcagacaagtctcccaactgcacagaagagatcacagaaggagtctggaatagaaaggctaacagaaaagtgtttggacagtgggtgtcgagcagtactctaaacatgagtgaagccataaaagggttcctggtcaagtgctgtgcatacaattcccttggcacatcttgtgagacgatccttttaaactctccaggccccttccctttcatccaagacaacatctcattctatgcaacaattggtgtttgtctcctcttcattgtcgttttaaccctgctaatttgtcacaagtacaaaaagcaatttaggtatgaaagccagctacagatggtacaggtgaccggctcctcagataatgagtacttctacgttgatttcagagaatatgaatatgatctcaaatgggagtttccaagagaaaatttagagtttgggaaggtactaggatcaggtgcttttggaaaagtgatgaacgcaacagcttatggaattagcaaaacaggagtctcaatccaggttgccgtcaaaatgctgaaagaaaaagcagacagctctgaaagagaggcactcatgtcagaactcaagatgatgacccagctgggaagccacgagaatattgtgaacctgctgggggcgtgcacactgtcaggaccaatttacttgatttttgaatactgttgctatggtgatcttctcaactatctaagaagtaaaagagaaaaatttcacaggacttggacagagattttcaaggaacacaatttcagtttttaccccactttccaatcacatccaaattccagcatgcctggttcaagagaagttcagatacacccggactcggatcaaatctcagggcttcatgggaattcatttcactctgaagatgaaattgaatatgaaaaccaaaaaaggctggaagaagaggaggacttgaatgtgcttacatttgaagatcttctttgctttgcatatcaagttgccaaaggaatggaatttctggaatttaagtcgtgtgttcacagagacctggccgccaggaacgtgcttgtcacccacgggaaagtggtgaagatatgtgactttggattggctcgagatatcatgagtgattccaactatgttgtcaggggcaatgcccgtctgcctgtaaaatggatggcccccgaaagcctgtttgaaggcatctacaccattaagagtgatgtctggtcatatggaatattactgtgggaaatcttctcacttggtgtgaatccttaccctggcattccggttgatgctaacttctacaaactgattcaaaatggatttaaaatggatcagccattttatgctacagaagaaatatacattataatgcaatcctgctgggcttttgactcaaggaaacggccatccttccctaatttgacttcgtttttaggatgtcagctggcagatgcagaagaagcgatgtatcagaatgtggatggccgtgtttcggaatgtcctcacacctaccaaaacaggcgacctttcagcagagagatggatttggggctactctctccgcaggctcaggtcgaagattcgtagaggaacaatttagttttaaggacttcatccctccacctatccctaacaggctgtagattaccaaaacaagattaatttcatcactaaaagaaaatctattatcaactgctgcttcaccagacttttctctagaagccgtctgcgtttactcttgttttcaaagggacttttgtaaaatcaaatcatcctgtcacaaggcaggaggagctgataatgaactttattggagcattgatctgcatccaaggccttctcaggccggcttgagtgaattgtgtacctgaagtacagtatattcttgtaaatacataaaacaaaagcattttgctaaggagaagctaatatgattttttaagtctatgttttaaaataatatgtaaatttttcagctatttagtgatatattttatgggtgggaataaaatttctactacag

SEQ ID NO: 196 - protein, 993 aa, Homo sapiens
  REGION 1..993: note = Flt3
MPALARDAGTVPLLVVFSAMIFGTITNQDLPVIKCVLINHKNNDSSVGKSSSYPMVSESPEDLGCALRPQSSGTVYEAAAVEVDVSASITLQVLVDAPGNISCLWVFKHSSLNCQPHFDLQNRGVVSMVILKMTETQAGEYLLFIQSEATNYTILFTVSIRNTLLYTLRRPYFRKMENQDALVCISESVPEPIVEWVLCDSQGESCKEESPAVVKKEEKVLHELFGTDIRCCARNELGRECTRLFTIDLNQTPQTTLPQLFLKVGEPLWIRCKAVHVNHGFGLTWELENKALEEGNYFEMSTYSTNRTMIRILFAFVSSVARNDTGYYTCSSSKHPSQSALVTIVGKGFINATNSSEDYEIDQYEEFCFSVRFKAYPQIRCTWTFSRKSFPCEQKGLDNGYSISKFCNHKHQPGEYIFHAENDDAQFTKMFTLNIRRKPQVLAEASASQASCFSDGYPLPSWTWKKCSDKSPNCTEEITEGVWNRKANRKVFGQWVSSSTLNMSEAIKGFLVKCCAYNSLGTSCETILLNSPGPFPFIQDNISFYATIGVCLLFIVVLTLLICHKYKKQFRYESQLQMVQVTGSSDNEYFYVDFREYEYDLKWEFPRENLEFGKVLGSGAFGKVMNATAYGISKTGVSIQVAVKMLKEKADSSEREALMSELKMMTQLGSHENIVNLLGACTLSGPIYLIFEYCCYGDLLNYLRSKREKFHRTWTEIFKEHNFSFYPTFQSHPNSSMPGSREVQIHPDSDQISGLHGNSFHSEDEIEYENQKRLEEEEDLNVLTFEDLLCFAYQVAKGMEFLEFKSCVHRDLAARNVLVTHGKVVKICDFGLARDIMSDSNYVVRGNARLPVKWMAPESLFEGIYTIKSDVWSYGILLWEIFSLGVNPYPGIPVDANFYKLIQNGFKMDQPFYATEEIYIIMQSCWAFDSRKRPSFPNLTSFLGCQLADAEEAMYQNVDGRVSECPHTYQNRRPFSREMDLGLLSPQAQVEDS

SEQ ID NO: 197 - DNA, 5084 bp, Homo sapiens
  misc_feature 1..5084: note = KIT
  source 1..5084: mol_type = genomic DNA
gatcccatcgcagctaccgcgatgagaggcgctcgcggcgcctgggattttctctgcgttctgctcctactgcttcgcgtccagacaggctcttctcaaccatctgtgagtccaggggaaccgtctccaccatccatccatccaggaaaatcagacttaatagtccgcgtgggcgacgagattaggctgttatgcactgatccgggctttgtcaaatggacttttgagatcctggatgaaacgaatgagaataagcagaatgaatggatcacggaaaaggcagaagccaccaacaccggcaaatacacgtgcaccaacaaacacggcttaagcaattccatttatgtgtttgttagagatcctgccaagcttttccttgttgaccgctccttgtatgggaaagaagacaacgacacgctggtccgctgtcctctcacagacccagaagtgaccaattattccctcaaggggtgccaggggaagcctcttcccaaggacttgaggtttattcctgaccccaaggcgggcatcatgatcaaaagtgtgaaacgcgcctaccatcggctctgtctgcattgttctgtggaccaggagggcaagtcagtgctgtcggaaaaattcatcctgaaagtgaggccagccttcaaagctgtgcctgttgtgtctgtgtccaaagcaagctatcttcttagggaaggggaagaattcacagtgacgtgcacaataaaagatgtgtctagttctgtgtactcaacgtggaaaagagaaaacagtcagactaaactacaggagaaatataatagctggcatcacggtgacttcaattatgaacgtcaggcaacgttgactatcagttcagcgagagttaatgattctggagtgttcatgtgttatgccaataatacttttggatcagcaaatgtcacaacaaccttggaagtagtagataaaggattcattaatatcttccccatgataaacactacagtatttgtaaacgatggagaaaatgtagatttgattgttgaatatgaagcattccccaaacctgaacaccagcagtggatctatatgaacagaaccttcactgataaatgggaagattatcccaagtctgagaatgaaagtaatatcagatacgtaagtgaacttcatctaacgagattaaaaggcaccgaaggaggcacttacacattcctagtgtccaattctgacgtcaatgctgccatagcatttaatgtttatgtgaatacaaaaccagaaatcctgacttacgacaggctcgtgaatggcatgctccaatgtgtggcagcaggattcccagagcccacaatagattggtatttttgtccaggaactgagcagagatgctctgcttctgtactgccagtggatgtgcagacactaaactcatctgggccaccgtttggaaagctagtggttcagagttctatagattctagtgcattcaagcacaatggcacggttgaatgtaaggcttacaacgatgtgggcaagacttctgcctattttaactttgcatttaaaggtaacaacaaagagcaaatccatccccacaccctgttcactcctttgctgattggtttcgtaatcgtagctggcatgatgtgcattattgtgatgattctgacctacaaatatttacagaaacccatgtatgaagtacagtggaaggttgttgaggagataaatggaaacaattatgtttacatagacccaacacaacttccttatgatcacaaatgggagtttcccagaaacaggctgagttttgggaaaaccctgggtgctggagctttcgggaaggttgttgaggcaactgcttatggcttaattaagtcagatgcggccatgactgtcgctgtaaagatgctcaagccgagtgcccatttgacagaacgggaagccctcatgtctgaactcaaagtcctgagttaccttggtaatcacatgaatattgtgaatctacttggagcctgcaccattggagggcccaccctggtcattacagaatattgttgctatggtgatcttttgaattttttgagaagaaaacgtgattcatttatttgttcaaagcaggaagatcatgcagaagctgcactttataagaatcttctgcattcaaaggagtcttcctgcagcgatagtactaatgagtacatggacatgaaacctggagtttcttatgttgtcccaaccaaggccgacaaaaggagatctgtgagaataggctcatacatagaaagagatgtgactcccgccatcatggaggatgacgagttggccctagacttagaagacttgctgagcttttcttaccaggtggcaaagggcatggctttcctcgcctccaagaattgtattcacagagacttggcagccagaaatatcctccttactcatggtcggatcacaaagatttgtgattttggtctagccagagacatcaagaatgattctaattatgtggttaaaggaaacgctcgactacctgtgaagtggatggcacctgaaagcattttcaactgtgtatacacgtttgaaagtgacgtctggtcctatgggatttttctttgggagctgttctctttaggaagcagcccctatcctggaatgccggtcgattctaagttctacaagatgatcaaggaaggcttccggatgctcagccctgaacacgcacctgctgaaatgtatgacataatgaagacttgctgggatgcagatcccctaaaaagaccaacattcaagcaaattgttcagctaattgagaagcagatttcagagagcaccaatcatatttactccaacttagcaaactgcagccccaaccgacagaagcccgtggtagaccattctgtgcggatcaattctgtcggcagcaccgcttcctcctcccagcctctgcttgtgcacgacgatgtctgagcagaatcagtgtttgggtcacccctccaggaatgatctcttcttttggcttccatgatggttattttcttttctttcaacttgcatccaactccaggatagtgggcaccccactgcaatcctgtctttctgagcacactttagtggccgatgatttttgtcatcagccaccatcctattgcaaaggttccaactgtatatattcccaatagcaacgtagcttctaccatgaacagaaaacattctgatttggaaaaagagagggaggtatggactgggggccagagtcctttccaaggcttctccaattctgcccaaaaatatggttgatagtttacctgaataaatggtagtaatcacagttggccttcagaaccatccatagtagtatgatgatacaagattagaagctgaaaacctaagtcctttatgtggaaaacagaacatcattagaacaaaggacagagtatgaacacctgggcttaagaaatctagtatttcatgctgggaatgagacataggccatgaaaaaaatgatccccaagtgtgaacaaaagatgctcttctgtggaccactgcatgagcttttatactaccgacctggtttttaaatagagtttgctattagagcattgaattggagagaaggcctccctagccagcacttgtatatacgcatctataaattgtccgtgttcatacatttgaggggaaaacaccataaggtttcgtttctgtatacaaccctggcattatgtccactgtgtatagaagtagattaagagccatataagtttgaaggaaacagttaataccattttttaaggaaacaatataaccacaaagcacagtttgaacaaaatctcctcttttagctgatgaacttattctgtagattctgtggaacaagcctatcagcttcagaatggcattgtactcaatggatttgatgctgtttgacaaagttactgattcactgcatggctcccacaggagtgggaaaacactgccatcttagtttggattcttatgtagcaggaaataaagtataggtttagcctccttcgcaggcatgtcctggacaccgggccagtatctatatatgtgtatgtacgtttgtatgtgtgtagacaaatatttggaggggtatttttgccctgagtccaagagggtcctttagtacctgaaaagtaacttggctttcattattagtactgctcttgtttcttttcacatagctgtctagagtagcttaccagaagcttccatagtggtgcagaggaagtggaaggcatcagtccctatgtatttgcagttcacctgcacttaaggcactctgttatttagactcatcttactgtacctgttccttagaccttccataatgctactgtctcactgaaacatttaaattttaccctttagactgtagcctggatattattcttgtagtttacctctttaaaaacaaaacaaaacaaaacaaaaaactccccttcctcactgcccaatataaaaggcaaatgtgtacatggcagagtttgtgtgttgtcttgaaagattcaggtatgttgcctttatggtttcccccttctacatttcttagactacatttagagaactgtggccgttatctggaagtaaccatttgcactggagttctatgctctcgcacctttccaaagttaacagattttggggttgtgttgtcacccaagagattgttgtttgccatactttgtctgaaaaattcctttgtgtttctattgacttcaatgatagtaagaaaagtggttgttagttatagatgtctaggtacttcaggggcacttcattgagagttttgtcttgccatactttgtctgaaaaattcctttgtgtttctattgacttcaatgatagtaagaaaagtggttgttagttatagatgtctaggtacttcaggggcacttcattgagagttttgtcaatgtcttttgaatattcccaagcccatgagtccttgaaaatattttttatatatacagtaactttatgtgtaaatacataagcggcgtaagtttaaaggatgttggtgttccacgtgttttattcctgtatgttgtccaattgttgacagttctgaagaattc

SEQ ID NO: 198 - protein, 976 aa, Homo sapiens [sequence omitted]

SEQ ID NO: 199 - DNA, 6405 bp, Homo sapiens
  source 1..6405: mol_type = genomic DNA
ggtttttgagcccattactgttggagctacagggagagaaacagaggaggagactgcaagagatcattggaggccgtgggcacgctctttactccatgtgtgggacattcattgcggaataacatcggaggagaagtttcccagagctatggggacttcccatccggcgttcctggtcttaggctgtcttctcacagggctgagcctaatcctctgccagctttcattaccctctatccttccaaatgaaaatgaaaaggttgtgcagctgaattcatccttttctctgagatgctttggggagagtgaagtgagctggcagtaccccatgtctgaagaagagagctccgatgtggaaatcagaaatgaagaaaacaacagcggcctttttgtgacggtcttggaagtgagcagtgcctcggcggcccacacagggttgtacacttgctattacaaccacactcagacagaagagaatgagcttgaaggcaggcacatttacatctatgtgccagacccagatgtagcctttgtacctctaggaatgacggattatttagtcatcgtggaggatgatgattctgccattataccttgtcgcacaactgatcccgagactcctgtaaccttacacaacagtgagggggtggtacctgcctcctacgacagcagacagggctttaatgggaccttcactgtagggccctatatctgtgaggccaccgtcaaaggaaagaagttccagaccatcccatttaatgtttatgctttaaaagcaacatcagagctggatctagaaatggaagctcttaaaaccgtgtataagtcaggggaaacgattgtggtcacctgtgctgtttttaacaatgaggtggttgaccttcaatggacttaccctggagaagtgaaaggcaaaggcatcacaatgctggaagaaatcaaagtcccatccatcaaattggtgtacactttgacggtccccgaggccacggtgaaagacagtggagattacgaatgtgctgcccgccaggctaccagggaggtcaaagaaatgaagaaagtcactatttctgtccatgagaaaggtttcattgaaatcaaacccaccttcagccagttggaagctgtcaacctgcatgaagtcaaacattttgttgtagaggtgcgggcctacccacctcccaggatatcctggctgaaaaacaatctgactctgattgaaaatctcactgagatcaccactgatgtggaaaagattcaggaaataaggtatcgaagcaaattaaagctgatccgtgctaaggaagaagacagtggccattatactattgtagctcaaaatgaagatgctgtgaagagctatacttttgaactgttaactcaagttccttcatccattctggacttggtcgatgatcaccatggctcaactgggggacagacggtgaggtgcacagctgaaggcacgccgcttcctgatattgagtggatgatatgcaaagatattaagaaatgtaataatgaaacttcctggactattttggccaacaatgtctcaaacatcatcacggagatccactcccgagacaggagtaccgtggagggccgtgtgactttcgccaaagtggaggagaccatcgccgtgcgatgcctggctaagaatctccttggagctgagaaccgagagctgaagctggtggctcccaccctgcgttctgaactcacggtggctgctgcagtcctggtgctgttggtgattgtgatcatctcacttattgtcctggttgtcatttggaaacagaaaccgaggtatgaaattcgctggagggtcattgaatcaatcagcccagatggacatgaatatatttatgtggacccgatgcagctgccttatgactcaagatgggagtttccaagagatggactagtgcttggtcgggtcttggggtctggagcgtttgggaaggtggttgaaggaacagcctatggattaagccggtcccaacctgtcatgaaagttgcagtgaagatgctaaaacccacggccagatccagtgaaaaacaagctctcatgtctgaactgaagataatgactcacctggggccacatttgaacattgtaaacttgctgggagcctgcaccaagtcaggccccatttacatcatcacagagtattgcttctatggagatttggtcaactatttgcataagaatagggatagcttcctgagccaccacccagagaagccaaagaaagagctggatatctttggattgaaccctgctgatgaaagcacacggagctatgttattttatcttttgaaaacaatggtgactacatggacatgaagcaggctgatactacacagtatgtccccatgctagaaaggaaagaggtttctaaatattccgacatccagagatcactctatgatcgtccagcctcatataagaagaaatctatgttagactcagaagtcaaaaacctcctttcagatgataactcagaaggccttactttattggatttgttgagcttcacctatcaagttgcccgaggaatggagtttttggcttcaaaaaattgtgtccaccgtgatctggctgctcgcaacgtcctcctggcacaaggaaaaattgtgaagatctgtgactttggcctggccagagacatcatgcatgattcgaactatgtgtcgaaaggcagtacctttctgcccgtgaagtggatggctcctgagagcatctttgacaacctctacaccacactgagtgatgtctggtcttatggcattctgctctgggagatcttttcccttggtggcaccccttaccccggcatgatggtggattctactttctacaataagatcaagagtgggtaccggatggccaagcctgaccacgctaccagtgaagtctacgagatcatggtgaaatgctggaacagtgagccggagaagagaccctccttttaccacctgagtgagattgtggagaatctgctgcctggacaatataaaaagagttatgaaaaaattcacctggacttcctgaagagtgaccatcctgctgtggcacgcatgcgtgtggactcagacaatgcatacattggtgtcacctacaaaaacgaggaagacaagctgaaggactgggagggtggtctggatgagcagagactgagcgctgacagtggctacatcattcctctgcctgacattgaccctgtccctgaggaggaggacctgggcaagaggaacagacacagctcgcagacctctgaagagagtgccattgagacgggttccagcagttccaccttcatcaagagagaggacgagaccattgaagacatcgacatgatggacgacatcggcatagactcttcagacctggtggaagacagcttcctgtaactggcggattcgaggggttccttccacttctggggccacctctggatcccgttcagaaaaccactttattgcaatgcggaggttgagaggaggacttggttgatgtttaaagagaagttcccagccaagggcctcggggagcgttctaaatatgaatgaatgggatattttgaaatgaactttgtcagtgttgcctcttgcaatgcctcagtagcatctcagtggtgtgtgaagtttggagatagatggataagggaataataggccacagaaggtgaactttgtgcttcaaggacattggtgagagtccaacagacacaatttatactgcgacagaacttcagcattgtaattatgtaaataactctaaccaaggctgtgtttagattgtattaactatcttctttggacttctgaagagaccactcaatccatccatgtacttccctcttgaaacctgatgtcagctgctgttgaactttttaaagaagtgcatgaaaaaccatttttgaaccttaaaaggtactggtactatagcattttgctatcttttttagtgttaaagagataaagaataataattaaccaaccttgtttaatagatttgggtcatttagaagcctgacaactcattttcatattgtaatctatgtttataatactactactgttatcagtaatgctaaatgtgtaataatgtaacatgatttccctccagagaaagcacaatttaaaacaatccttactaagtaggtgatgagtttgacagtttttgacatttatattaaataacatgtttctctataaagtatggtaatagctttagtgaattaaatttagttgagcatagagaacaaagtaaaagtagtgttgtccaggaagtcagaatttttaactgtactgaataggttccccaatccatcgtattaaaaaacaattaactgccctctgaaataatgggattagaaacaaacaaaactcttaagtcctaaaagttctcaatgtagaggcataaacctgtgctgaacataacttctcatgtatattacccaatggaaaatataatgatcagcaaaaagactggatttgcagaagttttttttttttttttcttcatgcctgatgaaagctttggcgaccccaatatatgtattttttgaatctatgaacctgaaaagggtcagaaggatgcccagacatcagcctccttctttcaccccttaccccaaagagaaagagtttgaaactcgagaccataaagatattctttagtggaggctggatgtgcattagcctggatcctcagttctcaaatgtgtgtggcagccaggatgactagatcctgggtttccatccttgagattctgaagtatgaagtctgagggaaaccagagtctgtatttttctaaactccctggctgttctgatcggccagttttcggaaacactgacttaggtttcaggaagttgccatgggaaacaaataatttgaactttggaacagggttggaattcaaccacgcaggaagcctactatttaaatccttggcttcaggttagtgacatttaatgccatctagctagcaattgcgaccttaatttaactttccagtcttagctgaggctgagaaagctaaagtttggttttgacaggttttccaaaagtaaagatgctacttcccactgtatgggggagattgaactttccccgtctcccgtcttctgcctcccactccataccccgccaaggaaaggcatgtacaaaaattatgcaattcagtgttccaagtctctgtgtaaccagctcagtgttttggtggaaaaaacattttaagttttactgataatttgaggttagatgggaggatgaattgtcacatctatccacactgtcaaacaggttggtgtgggttcattggcattctttgcaatactgcttaattgctgataccatatgaatgaaacatgggctgtgattactgcaatcactgtgctatcggcagatgatgctttggaagatgcagaagcaataataaagtacttgactacctactggtgtaatctcaatgcaagccccaactttcttatccaactttttcatagtaagtgcgaagactgagccagattggccaattaaaaacgaaaacctgactaggttctgtagagccaattagacttgaaatacgtttgtgtttctagaatcacagctcaagcattctgtttatcgctcactctcccttgtacagccttattttgttggtgctttgcattttgatattgctgtgagccttgcatgacatcatgaggccggatgaaacttctcagtccagcagtttccagtcctaacaaatgctcccacctgaatttgtatatgactgcatttgtgtgtgtgtgtgtgttttcagcaaattccagatttgtttccttttggcctcctgcaaagtctccagaagaaaatttgccaatctttcctactttctatttttatgatgacaatcaaagccggcctgagaaacactatttgtgactttttaaacgattagtgatgtccttaaaatgtggtctgccaatctgtacaaaatggtcctatttttgtgaagagggacataagataaaatgatgttatacatcaatatgtatatatgtatttctatatagacttggagaatactgccaaaacatttatgacaagctgtatcactgccttcgtttatatttttttaactgtgataatccccacaggcacattaactgttgcacttttgaatgtccaaaatttatattttagaaataataaaaagaaagatacttacatgttcccaaaacaatggtgtggtgaatgtgtgagaaaaactaacttgatagggtctaccaatacaaaatgtattacgaatgcccctgttcatgtttttgttttaaaacgtgtaaatgaagatctttatatttcaataaatgatatataatttaaagttaaaaaaaaaaaaaaa

SEQ ID NO: 200 - protein, 1089 aa, Homo sapiens
  REGION 1..1089: note = PDGFRA
MGTSHPAFLVLGCLLTGLSLILCQLSLPSILPNENEKVVQLNSSFSLRCFGESEVSWQYPMSEEESSDVEIRNEENNSGLFVTVLEVSSASAAHTGLYTCYYNHTQTEENELEGRHIYIYVPDPDVAFVPLGMTDYLVIVEDDDSAIIPCRTTDPETPVTLHNSEGVVPASYDSRQGFNGTFTVGPYICEATVKGKKFQTIPFNVYALKATSELDLEMEALKTVYKSGETIVVTCAVFNNEVVDLQWTYPGEVKGKGITMLEEIKVPSIKLVYTLTVPEATVKDSGDYECAARQATREVKEMKKVTISVHEKGFIEIKPTFSQLEAVNLHEVKHFVVEVRAYPPPRISWLKNNLTLIENLTEITTDVEKIQEIRYRSKLKLIRAKEEDSGHYTIVAQNEDAVKSYTFELLTQVPSSILDLVDDHHGSTGGQTVRCTAEGTPLPDIEWMICKDIKKCNNETSWTILANNVSNIITEIHSRDRSTVEGRVTFAKVEETIAVRCLAKNLLGAENRELKLVAPTLRSELTVAAAVLVLLVIVIISLIVLVVIWKQKPRYEIRWRVIESISPDGHEYIYVDPMQLPYDSRWEFPRDGLVLGRVLGSGAFGKVVEGTAYGLSRSQPVMKVAVKMLKPTARSSEKQALMSELKIMTHLGPHLNIVNLLGACTKSGPIYIITEYCFYGDLVNYLHKNRDSFLSHHPEKPKKELDIFGLNPADESTRSYVILSFENNGDYMDMKQADTTQYVPMLERKEVSKYSDIQRSLYDRPASYKKKSMLDSEVKNLLSDDNSEGLTLLDLLSFTYQVARGMEFLASKNCVHRDLAARNVLLAQGKIVKICDFGLARDIMHDSNYVSKGSTFLPVKWMAPESIFDNLYTTLSDVWSYGILLWEIFSLGGTPYPGMMVDSTFYNKIKSGYRMAKPDHATSEVYEIMVKCWNSEPEKRPSFYHLSEIVENLLPGQYKKSYEKIHLDFLKSDHPAVARMRVDSDNAYIGVTYKNEEDKLKDWEGGLDEQRLSADSGYIIPLPDIDPVPEEEDLGKRNRHSSQTSEESAIETGSSSSTFIKREDETIEDIDMMDDIGIDSSDLVEDSFL

SEQ ID NO: 201 - DNA, 5718 bp, Homo sapiens
  misc_feature 1..5718: note = PDGFRB
  source 1..5718: mol_type = genomic DNA
ctcctgaggctgccagcagccagcagtgactgcccgccctatctgggacccaggatcgctctgtgagcaacttggagccagagaggagatcaacaaggaggaggagagagccggcccctcagccctgctgcccagcagcagcctgtgctcgccctgcccaacgcagacagccagacccagggcggcccctctggcggctctgctcctcccgaaggatgcttggggagtgaggcgaagctgggccgctcctctcccctacagcagcccccttcctccatccctctgttctcctgagccttcaggagcctgcaccagtcctgcctgtccttctactcagctgttacccactctgggaccagcagtctttctgataactgggagagggcagtaaggaggacttcctggagggggtgactgtccagagcctggaactgtgcccacaccagaagccatcagcagcaaggacaccatgcggcttccgggtgcgatgccagctctggccctcaaaggcgagctgctgttgctgtctctcctgttacttctggaaccacagatctctcagggcctggtcgtcacacccccggggccagagcttgtcctcaatgtctccagcaccttcgttctgacctgctcgggttcagctccggtggtgtgggaacggatgtcccaggagcccccacaggaaatggccaaggcccaggatggcaccttctccagcgtgctcacactgaccaacctcactgggctagacacgggagaatacttttgcacccacaatgactcccgtggactggagaccgatgagcggaaacggctctacatctttgtgccagatcccaccgtgggcttcctccctaatgatgccgaggaactattcatctttctcacggaaataactgagatcaccattccatgccgagtaacagacccacagctggtggtgacactgcacgagaagaaaggggacgttgcactgcctgtcccctatgatcaccaacgtggcttttctggtatctttgaggacagaagctacatctgcaaaaccaccattggggacagggaggtggattctgatgcctactatgtctacagactccaggtgtcatccatcaacgtctctgtgaacgcagtgcagactgtggtccgccagggtgagaacatcaccctcatgtgcattgtgatcgggaatgaggtggtcaacttcgagtggacatacccccgcaaagaaagtgggcggctggtggagccggtgactgacttcctcttggatatgccttaccacatccgctccatcctgcacatccccagtgccgagttagaagactcggggacctacacctgcaatgtgacggagagtgtgaatgaccatcaggatgaaaaggccatcaacatcaccgtggttgagagcggctacgtgcggctcctgggagaggtgggcacactacaatttgctgagctgcatcggagccggacactgcaggtagtgttcgaggcctacccaccgcccactgtcctgtggttcaaagacaaccgcaccctgggcgactccagcgctggcgaaatcgccctgtccacgcgcaacgtgtcggagacccggtatgtgtcagagctgacactggttcgcgtgaaggtggcagaggctggccactacaccatgcgggccttccatgaggatgctgaggtccagctctccttccagctacagatcaatgtccctgtccgagtgctggagctaagtgagagccaccctgacagtggggaacagacagtccgctgtcgtggccggggcatgccccagccgaacatcatctggtctgcctgcagagacctcaaaaggtgtccacgtgagctgccgcccacgctgctggggaacagttccgaagaggagagccagctggagactaacgtgacgtactgggaggaggagcaggagtttgaggtggtgagcacactgcgtctgcagcacgtggatcggccactgtcggtgcgctgcacgctgcgcaacgctgtgggccaggacacgcaggaggtcatcgtggtgccacactccttgccctttaaggtggtggtgatctcagccatcctggccctggtggtgctcaccatcatctcccttatcatcctcatcatgctttggcagaagaagccacgttacgagatccgatggaaggtgattgagtctgtgagctctgacggccatgagtacatctacgtggaccccatgcagctgccctatgactccacgtgggagctgccgcgggaccagcttgtgctgggacgcaccctcggctctggggcctttgggcaggtggtggaggccacggctcatggcctgagccattctcaggccacgatgaaagtggccgtcaagatgcttaaatccacagcccgcagcagtgagaagcaagcccttatgtcggagctgaagatcatgagtcaccttgggccccacctgaacgtggtcaacctgttgggggcctgcaccaaaggaggacccatctatatcatcactgagtactgccgctacggagacctggtggactacctgcaccgcaacaaacacaccttcctgcagcaccactccgacaagcgccgcccgcccagcgcggagctctacagcaatgctctgcccgttgggctccccctgcccagccatgtgtccttgaccggggagagcgacggtggctacatggacatgagcaaggacgagtcggtggactatgtgcccatgctggacatgaaaggagacgtcaaatatgcagacatcgagtcctccaactacatggccccttacgataactacgttccctctgcccctgagaggacctgccgagcaactttgatcaacgagtctccagtgctaagctacatggacctcgtgggcttcagctaccaggtggccaatggcatggagtttctggcctccaagaactgcgtccacagagacctggcggctaggaacgtgctcatctgtgaaggcaagctggtcaagatctgtgactttggcctggctcgagacatcatgcgggactcgaattacatctccaaaggcagcacctttttgcctttaaagtggatggctccggagagcatcttcaacagcctctacaccaccctgagcgacgtgtggtccttcgggatcctgctctgggagatcttcaccttgggtggcaccccttacccagagctgcccatgaacgagcagttctacaatgccatcaaacggggttaccgcatggcccagcctgcccatgcctccgacgagatctatgagatcatgcagaagtgctgggaagagaagtttgagattcggccccccttctcccagctggtgctgcttctcgagagactgttgggcgaaggttacaaaaagaagtaccagcaggtggatgaggagtttctgaggagtgaccacccagccatccttcggtcccaggcccgcttgcctgggttccatggcctccgatctcccctggacaccagctccgtcctctatactgccgtgcagcccaatgagggtgacaacgactatatcatccccctgcctgaccccaaacccgaggttgctgacgagggcccactggagggttcccccagcctagccagctccaccctgaatgaagtcaacacctcctcaaccatctcctgtgacagccccctggagccccaggacgaaccagagccagagccccagcttgagctccaggtggagccggagccagagctggaacagttgccggattcggggtgccctgcgcctcgggcggaagcagaggatagcttcctgtagggggctggcccctaccctgccctgcctgaagctccccccctgccagcacccagcatctcctggcctggcctgaccgggcttcctgtcagccaggctgcccttatcagctgtccccttctggaagctttctgctcctgacgtgttgtgccccaaaccctggggctggcttaggaggcaagaaaactgcaggggccgtgaccagccctctgcctccagggaggccaactgactctgagccagggttcccccagggaactcagttttcccatatgtaagatgggaaagttaggcttgatgacccagaatctaggattctctccctggctgacaggtggggagaccgaatccctccctgggaagattcttggagttactgaggtggtaaattaacttttttctgttcagccagctacccctcaaggaatcatagctctctcctcgcacttttatccacccaggagctagggaagagaccctagcctccctggctgctggctgagctagggcctagccttgagcagtgttgcctcatccagaagaaagccagtctcctccctatgatgccagtccctgcgttccctggcccgagctggtctggggccattaggcagcctaattaatgctggaggctgagccaagtacaggacacccccagcctgcagcccttgcccagggcacttggagcacacgcagccatagcaagtgcctgtgtccctgtccttcaggcccatcagtcctggggctttttctttatcaccctcagtcttaatccatccaccagagtctagaaggccagacgggccccgcatctgtgatgagaatgtaaatgtgccagtgtggagtggccacgtgtgtgtgccagtatatggccctggctctgcattggacctgctatgaggctttggaggaatccctcaccctctctgggcctcagtttccccttcaaaaaatgaataagtcggacttattaactctgagtgccttgccagcactaacattctagagtattccaggtggttgcacatttgtccagatgaagcaaggccatataccctaaacttccatcctgggggtcagctgggctcctgggagattccagatcacacatcacactctggggactcaggaaccatgccccttccccaggcccccagcaagtctcaagaacacagctgcacaggccttgacttagagtgacagccggtgtcctggaaagcccccagcagctgccccagggacatgggaagaccacgggacctctttcactacccacgatgacctccgggggtatcctgggcaaaagggacaaagagggcaaatgagatcacctcctgcagcccaccactccagcacctgtgccgaggtctgcgtcgaagacagaatggacagtgaggacagttatgtcttgtaaaagacaagaagcttcagatgggtaccccaagaaggatgtgagaggtgggcgctttggaggtttgcccctcacccaccagctgccccatccctgaggcagcgctccatgggggtatggttttgtcactgcccagacctagcagtgacatctcattgtccccagcccagtgggcattggaggtgccaggggagtcagggttgtagccaagacgcccccgcacggggagggttgggaagggggtgcaggaagctcaacccctctgggcaccaaccctgcattgcaggttggcaccttacttccctgggatccccagagttggtccaaggagggagagtgggttctcaatacggtaccaaagatataatcacctaggtttacaaatatttttaggactcacgttaactcacatttatacagcagaaatgctattttgtatgctgttaagtttttctatctgtgtacttttttttaagggaaagattttaatattaaacctggtgcttctcactcacaaaaa

SEQ ID NO: 202 - protein, 1106 aa, Homo sapiens
  REGION 1..1106: note = PDGFRB
MRLPGAMPALALKGELLLLSLLLLLEPQISQGLVVTPPGPELVLNVSSTFVLTCSGSAPVVWERMSQEPPQEMAKAQDGTFSSVLTLTNLTGLDTGEYFCTHNDSRGLETDERKRLYIFVPDPTVGFLPNDAEELFIFLTEITEITIPCRVTDPQLVVTLHEKKGDVALPVPYDHQRGFSGIFEDRSYICKTTIGDREVDSDAYYVYRLQVSSINVSVNAVQTVVRQGENITLMCIVIGNEVVNFEWTYPRKESGRLVEPVTDFLLDMPYHIRSILHIPSAELEDSGTYTCNVTESVNDHQDEKAINITVVESGYVRLLGEVGTLQFAELHRSRTLQVVFEAYPPPTVLWFKDNRTLGDSSAGEIALSTRNVSETRYVSELTLVRVKVAEAGHYTMRAFHEDAEVQLSFQLQINVPVRVLELSESHPDSGEQTVRCRGRGMPQPNIIWSACRDLKRCPRELPPTLLGNSSEEESQLETNVTYWEEEQEFEVVSTLRLQHVDRPLSVRCTLRNAVGQDTQEVIVVPHSLPFKVVVISAILALVVLTIISLIILIMLWQKKPRYEIRWKVIESVSSDGHEYIYVDPMQLPYDSTWELPRDQLVLGRTLGSGAFGQVVEATAHGLSHSQATMKVAVKMLKSTARSSEKQALMSELKIMSHLGPHLNVVNLLGACTKGGPIYIITEYCRYGDLVDYLHRNKHTFLQHHSDKRRPPSAELYSNALPVGLPLPSHVSLTGESDGGYMDMSKDESVDYVPMLDMKGDVKYADIESSNYMAPYDNYVPSAPERTCRATLINESPVLSYMDLVGFSYQVANGMEFLASKNCVHRDLAARNVLICEGKLVKICDFGLARDIMRDSNYISKGSTFLPLKWMAPESIFNSLYTTLSDVWSFGILLWEIFTLGGTPYPELPMNEQFYNAIKRGYRMAQPAHASDEIYEIMQKCWEEKFEIRPPFSQLVLLLERLLGEGYKKKYQQVDEEFLRSDHPAILRSQARLPGFHGLRSPLDTSSVLYTAVQPNEGDNDYIIPLPDPKPEVADEGPLEGSPSLASSTLNEVNTSSTISCDSPLEPQDEPEPEPQLELQVEPEPELEQLPDSGCPAPRAEAEDSFL

SEQ ID NO: 203 - DNA, 3877 bp, Homo sapiens
  misc_feature 1..3877: note = DDR1
  source 1..3877: mol_type = genomic DNA
tgctctcgggagccgcctcccgacacccgagccccgccggcgcctcccgctcccggctcccggctcctggctccctccgcctcccccgcccctcgccccgccgccgaagaggccccgctcccgggtcggacgcctgggtctgccgggaagagcgatgagaggtgtctgaaggtggctattcactgagcgatggggttggacttgaaggaatgccaagagatgctgcccccacccccttaggcccgagggatcaggagctatgggaccagaggccctgtcatctttactgctgctgctcttggtggcaagtggagatgctgacatgaagggacattttgatcctgccaagtgccgctatgccctgggcatgcaggaccggaccatcccagacagtgacatctctgcttccagctcctggtcagattccactgccgcccgccacagcaggttggagagcagtgacggggatggggcctggtgccccgcagggtcggtgtttcccaaggaggaggagtacttgcaggtggatctacaacgactgcacctggtggctctggtgggcacccagggacggcatgccgggggcctgggcaaggagttctcccggagctaccggctgcgttactcccgggatggtcgccgctggatgggctggaaggaccgctggggtcaggaggtgatctcaggcaatgaggaccctgagggagtggtgctgaaggaccttgggccccccatggttgcccgactggttcgcttctacccccgggctgaccgggtcatgagcgtctgtctgcgggtagagctctatggctgcctctggagggatggactcctgtcttacaccgcccctgtggggcagacaatgtatttatctgaggccgtgtacctcaacgactccacctatgacggacataccgtgggcggactgcagtatgggggtctgggccagctggcagatggtgtggtggggctggatgactttaggaagagtcaggagctgcgggtctggccaggctatgactatgtgggatggagcaaccacagcttctccagtggctatgtggagatggagtttgagtttgaccggctgagggccttccaggctatgcaggtccactgtaacaacatgcacacgctgggagcccgtctgcctggcggggtggaatgtcgcttccggcgtggccctgccatggcctgggagggggagcccatgcgccacaacctagggggcaacctgggggaccccagagcccgggctgtctcagtgccccttggcggccgtgtggctcgctttctgcagtgccgcttcctctttgcggggccctggttactcttcagcgaaatctccttcatctctgatgtggtgaacaattcctctccggcactgggaggcaccttcccgccagccccctggtggccgcctggcccacctcccaccaacttcagcagcttggagctggagcccagaggccagcagcccgtggccaaggccgaggggagcccgaccgccatcctcatcggctgcctggtggccatcatcctgctcctgctgctcatcattgccctcatgctctggcggctgcactggcgcaggctcctcagcaaggctgaacggagggtgttggaagaggagctgacggttcacctctctgtccctggggacactatcctcatcaacaaccgcccaggtcctagagagccacccccgtaccaggagccccggcctcgtgggaatccgccccactccgctccctgtgtccccaatggctctgcgttgctgctctccaatccagcctaccgcctccttctggccacttacgcccgtccccctcgaggcccgggcccccccacacccgcctgggccaaacccaccaacacccaggcctacagtggggactatatggagcctgagaagccaggcgccccgcttctgcccccacctccccagaacagcgtcccccattatgccgaggctgacattgttaccctgcagggcgtcaccgggggcaacacctatgctgtgcctgcactgcccccaggggcagtcggggatgggccccccagagtggatttccctcgatctcgactccgcttcaaggagaagcttggcgagggccagtttggggaggtgcacctgtgtgaggtcgacagccctcaagatctggttagtcttgatttcccccttaatgtgcgtaagggacaccctttgctggtagctgtcaagatcttacggccagatgccaccaagaatgccaggaatgatttcctgaaagaggtgaagatcatgtcgaggctcaaggacccaaacatcattcggctgctgggcgtgtgtgtgcaggacgaccccctctgcatgattactgactacatggagaacggcgacctcaaccagttcctcagtgcccaccagctggaggacaaggcagccgagggggcccctggggacgggcaggctgcgcaggggcccaccatcagctacccaatgctgctgcatgtggcagcccagatcgcctccggcatgcgctatctggccacactcaactttgtacatcgggacctggccacgcggaactgcctagttggggaaaatttcaccatcaaaatcgcagactttggcatgagccggaacctctatgctggggactattaccgtgtgcagggccgggcagtgctgcccatccgctggatggcctgggagtgcatcctcatggggaagttcacgactgcgagtgacgtgtgggcctttggtgtgaccctgtgggaggtgctgatgctctgtagggcccagccctttgggcagctcaccgacgagcaggtcatcgagaacgcgggggagttcttccgggaccagggccggcaggtgtacctgtcccggccgcctgcctgcccgcagggcctatatgagctgatgcttcggtgctggagccgggagtctgagcagcgaccacccttttcccagctgcatcggttcctggcagaggatgcactcaacacggtgtgaatcacacatccagctgcccctccctcagggagcgatccaggggaagccagtgacactaaaacaagaggacacaatggcacctctgcccttcccctcccgacagcccatcacctctaatagaggcagtgagactgcaggtgggctgggcccacccagggagctgatgccccttctccccttcctggacacactctcatgtccccttcctgttcttccttcctagaagcccctgtcgcccacccagctggtcctgtggatgggatcctctccaccctcctctagccatcccttggggaagggtggggagaaatataggatagacactggacatggcccattggagcacctgggccccactggacaacactgattcctggagaggtggctgcgcccccagcttctctctccctgtcacacactggaccccactggctgagaatctgggggtgaggaggacaagaaggagaggaaaatgtttccttgtgcctgctcctgtacttgtcctcagcttgggcttcttcctcctccatcacctgaaacactggacctgggggtagccccgccccagccctcagtcacccccacttcccacttgcagtcttgtagctagaacttctctaagcctatacgtttctgtggagtaaatattgggattggggggaaagagggagcaacggcccatagccttggggttggacatctctagtgtagctgccacattgatttttctataatcacttggggtttgtacatttttggggggagagacacagatttttacactaatatatggacctagcttgaggcaattttaatcccctgcactaggcaggtaataataaaggttgagttttccacaaaaaaaaaaaaaaaaaa

SEQ ID NO: 204 - protein, 913 aa, Homo sapiens
  REGION 1..913: note = DDR1
MGPEALSSLLLLLLVASGDADMKGHFDPAKCRYALGMQDRTIPDSDISASSSWSDSTAARHSRLESSDGDGAWCPAGSVFPKEEEYLQVDLQRLHLVALVGTQGRHAGGLGKEFSRSYRLRYSRDGRRWMGWKDRWGQEVISGNEDPEGVVLKDLGPPMVARLVRFYPRADRVMSVCLRVELYGCLWRDGLLSYTAPVGQTMYLSEAVYLNDSTYDGHTVGGLQYGGLGQLADGVVGLDDFRKSQELRVWPGYDYVGWSNHSFSSGYVEMEFEFDRLRAFQAMQVHCNNMHTLGARLPGGVECRFRRGPAMAWEGEPMRHNLGGNLGDPRARAVSVPLGGRVARFLQCRFLFAGPWLLFSEISFISDVVNNSSPALGGTFPPAPWWPPGPPPTNFSSLELEPRGQQPVAKAEGSPTAILIGCLVAIILLLLLIIALMLWRLHWRRLLSKAERRVLEEELTVHLSVPGDTILINNRPGPREPPPYQEPRPRGNPPHSAPCVPNGSALLLSNPAYRLLLATYARPPRGPGPPTPAWAKPTNTQAYSGDYMEPEKPGAPLLPPPPQNSVPHYAEADIVTLQGVTGGNTYAVPALPPGAVGDGPPRVDFPRSRLRFKEKLGEGQFGEVHLCEVDSPQDLVSLDFPLNVRKGHPLLVAVKILRPDATKNARNDFLKEVKIMSRLKDPNIIRLLGVCVQDDPLCMITDYMENGDLNQFLSAHQLEDKAAEGAPGDGQAAQGPTISYPMLLHVAAQIASGMRYLATLNFVHRDLATRNCLVGENFTIKIADFGMSRNLYAGDYYRVQGRAVLPIRWMAWECILMGKFTTASDVWAFGVTLWEVLMLCRAQPFGQLTDEQVIENAGEFFRDQGRQVYLSRPPACPQGLYELMLRCWSRESEQRPPFSQLHRFLAEDALNTV

SEQ ID NO: 205 - DNA, 3172 bp, Homo sapiens
  misc_feature 1..3172: note = DDR2
  source 1..3172: mol_type = genomic DNA
gaatcctcagaatgtgaggtttctctcaaaggcatcttgcatcagcctgtggatgtatgcctaccaccgggctccttcaccagcaaagtggaaaaagaagcgtttcacaacaaattcttctttttgggttggggaaacgcagtggattatagctctgttttcttctttccaaaactgtgcacccctggatgaaacctccatcaagggagacctacaagttgcctggggttcagtgctctagaaagttccaaggtttgtggcttgaattattctaaagaagctgaaataattgaagagaagcagaggccagctgtttttgaggatcctgctccacagagaatgctctgcacccgttgatactccagttccaacaccatcttctgagatgatcctgattcccagaatgctcttggtgctgttcctgctgctgcctatcttgagttctgcaaaagctcaggttaatccagctatatgccgctatcctctgggcatgtcaggaggccagattccagatgaggacatcacagcttccagtcagtggtcagagtccacagctgccaaatatggaaggctggactcagaagaaggggatggagcctggtgccctgagattccagtggaacctgatgacctgaaggagtttctgcagattgacttgcacaccctccattttatcactctggtggggacccaggggcgccatgcaggaggtcatggcatcgagtttgcccccatgtacaagatcaattacagtcgggatggcactcgctggatctcttggcggaaccgtcatgggaaacaggtgctggatggaaatagtaacccctatgacattttcctaaaggacttggagccgcccattgtagccagatttgtccggttcattccagtcaccgaccactccatgaatgtgtgtatgagagtggagctttacggctgtgtctggctagatggcttggtgtcttacaatgctccagctgggcagcagtttgtactccctggaggttccatcatttatctgaatgattctgtctatgatggagctgttggatacagcatgacagaagggctaggccaattgaccgatggtgtgtctggcctggacgatttcacccagacccatgaataccacgtgtggcccggctatgactatgtgggctggcggaacgagagtgccaccaatggctacattgagatcatgtttgaatttgaccgcatcaggaatttcactaccatgaaggtccactgcaacaacatgtttgctaaaggtgtgaagatctttaaggaggtacagtgctacttccgctctgaagccagtgagtgggaacctaatgccatttccttcccccttgtcctggatgacgtcaaccccagtgctcggtttgtcacggtgcctctccaccaccgaatggccagtgccatcaagtgtcaataccattttgcagatacctggatgatgttcagtgagatcaccttccaatcagatgctgcaatgtacaacaactctgaagccctgcccacctctcctatggcacccacaacctatgatccaatgcttaaagttgatgacagcaacactcggatcctgattggctgcttggtggccatcatctttatcctcctggccatcattgtcatcatcctctggaggcagttctggcagaaaatgctggagaaggcttctcggaggatgctggatgatgaaatgacagtcagcctttccctgccaagtgattctagcatgttcaacaataaccgctcctcatcacctagtgaacaagggtccaactcgacttacgatcgcatctttccccttcgccctgactaccaggagccatccaggctgatacgaaaactcccagaatttgctccaggggaggaggagtcaggctgcagcggtgttgtgaagccagtccagcccagtggccctgagggggtgccccactatgcagaggctgacatagtgaacctccaaggagtgacaggaggcaacacatactcagtgcctgccgtcaccatggacctgctctcaggaaaagatgtggctgtggaggagttccccaggaaactcctaactttcaaagagaagctgggagaaggacagtttggggaggttcatctctgtgaagtggagggaatggaaaaattcaaagacaaagattttgccctagatgtcagtgccaaccagcctgtcctggtggctgtgaaaatgctccgagcagatgccaacaagaatgccaggaatgattttcttaaggagataaagatcatgtctcggctcaaggacccaaacatcatccatctattagctgtgtgtatcactgatgaccctctctgtatgatcactgaatacatggagaatggagatctcaatcagtttctttcccgccacgagccccctaattcttcctccagcgatgtacgcactgtcagttacaccaatctgaagtttatggctacccaaattgcctctggcatgaagtacctttcctctcttaattttgttcaccgagatctggccacacgaaactgtttagtgggtaagaactacacaatcaagatagctgactttggaatgagcaggaacctgtacagtggtgactattaccggatccagggccgggcagtgctccctatccgctggatgtcttgggagagtatcttgctgggcaagttcactacagcaagtgatgtgtgggcctttggggttactttgtgggagactttcaccttttgtcaagaacagccctattcccagctgtcagatgaacaggttattgagaatactggagagttcttccgagaccaagggaggcagacttacctccctcaaccagccatttgtcctgactctgtgtataagctgatgctcagctgctggagaagagatacgaagaaccgtccctcattccaagaaatccaccttctgctccttcaacaaggcgacgagtgatgctgtcagtgcctggccatgttcctacggctcaggtcctccctacaagacctaccactcacccatgcctatgccactccatctggacatttaatgaaactgagagacagaggcttgtttgctttgccctcttttcctggtcacccccactccctacccctgactcatatatacttttttttttttttacattaaagaactaaaaaaggaaaaaaaaaa

SEQ ID NO: 206 - protein, 855 aa, Homo sapiens
  REGION 1..855: note = DDR2
MILIPRMLLVLFLLLPILSSAKAQVNPAICRYPLGMSGGQIPDEDITASSQWSESTAAKYGRLDSEEGDGAWCPEIPVEPDDLKEFLQIDLHTLHFITLVGTQGRHAGGHGIEFAPMYKINYSRDGTRWISWRNRHGKQVLDGNSNPYDIFLKDLEPPIVARFVRFIPVTDHSMNVCMRVELYGCVWLDGLVSYNAPAGQQFVLPGGSIIYLNDSVYDGAVGYSMTEGLGQLTDGVSGLDDFTQTHEYHVWPGYDYVGWRNESATNGYIEIMFEFDRIRNFTTMKVHCNNMFAKGVKIFKEVQCYFRSEASEWEPNAISFPLVLDDVNPSARFVTVPLHHRMASAIKCQYHFADTWMMFSEITFQSDAAMYNNSEALPTSPMAPTTYDPMLKVDDSNTRILIGCLVAIIFILLAIIVIILWRQFWQKMLEKASRRMLDDEMTVSLSLPSDSSMFNNNRSSSPSEQGSNSTYDRIFPLRPDYQEPSRLIRKLPEFAPGEEESGCSGVVKPVQPSGPEGVPHYAEADIVNLQGVTGGNTYSVPAVTMDLLSGKDVAVEEFPRKLLTFKEKLGEGQFGEVHLCEVEGMEKFKDKDFALDVSANQPVLVAVKMLRADANKNARNDFLKEIKIMSRLKDPNIIHLLAVCITDDPLCMITEYMENGDLNQFLSRHEPPNSSSSDVRTVSYTNLKFMATQIASGMKYLSSLNFVHRDLATRNCLVGKNYTIKIADFGMSRNLYSGDYYRIQGRAVLPIRWMSWESILLGKFTTASDVWAFGVTLWETFTFCQEQPYSQLSDEQVIENTGEFFRDQGRQTYLPQPAICPDSVYKLMLSCWRRDTKNRPSFQEIHLLLLQQGDE

SEQ ID NO: 207 - DNA, 3367 bp, Homo sapiens
  misc_feature 1..3367: note = EphA1
  source 1..3367: mol_type = genomic DNA
gcccccgcccggcccgccccgctctcctagtcccttgcaacctggcgctgccatccgggccactgtcccaggtcccggcccggagctatggagcggcgctggcccctggggctagggctggtgctgctgctctgcgccccgctgcccccgggggcgcgcgccaaggaagttactctgatggacacaagcaaggcacagggagagctgggctggctgctggatcccccaaaagatgggtggagtgaacagcaacagatactgaatgggacacccctgtacatgtaccaggactgcccaatgcaaggacgcagagacactgaccactggcttcgctccaattggatctaccgcggggaggaggcttcccgcgtccacgtggagctgcagttcaccgtgcgggactgcaagagtttccctgggggagccgggcctctgggctgcaaggagaccttcaaccttctgtacatggagagtgaccaggatgtgggcattcagctccgacggcccttgttccagaaggtaaccacggtggctgcagaccagagcttcaccattcgagaccttgcgtctggctccgtgaagctgaatgtggagcgctgctctctgggccgcctgacccgccgtggcctctacctcgctttccacaacccgggtgcctgtgtggccctggtgtctgtccgggtcttctaccagcgctgtcctgagaccctgaatggcttggcccaattcccagacactctgcctggccccgctgggttggtggaagtggcggggacctgcttgccccacgcgcgggccagccccaggccctcaggtgcaccccgcatgcactgcagccctgatggcgagtggctggtgcctgtaggacggtgccactgtgagcctggctatgaggaaggtggcagtggcgaagcatgtgttgcctgccctagcggctcctaccggatggacatggacacaccccattgtctcacgtgcccccagcagagcactgctgagtctgagggggccaccatctgtacctgtgagagcggccattacagagctcccggggagggcccccaggtggcatgcacaggtcccccctcggccccccgaaacctgagcttctctgcctcagggactcagctctccctgcgttgggaacccccagcagatacggggggacgccaggatgtcagatacagtgtgaggtgttcccagtgtcagggcacagcacaggacggggggccctgccagccctgtggggtgggcgtgcacttctcgccgggggcccgggggctcaccacacctgcagtgcatgtcaatggccttgaaccttatgccaactacacctttaatgtggaagcccaaaatggagtgtcagggctgggcagctctggccatgccagcacctcagtcagcatcagcatggggcatgcagagtcactgtcaggcctgtctctgagactggtgaagaaagaaccgaggcaactagagctgacctgggcggggtcccggccccgaagccctggggcgaacctgacctatgagctgcacgtgctgaaccaggatgaagaacggtaccagatggttctagaacccagggtcttgctgacagagctgcagcctgacaccacatacatcgtcagagtccgaatgctgaccccactgggtcctggccctttctcccctgatcatgagtttcggaccagcccaccagtgtccaggggcctgactggaggagagattgtagccgtcatctttgggctgctgcttggtgcagccttgctgcttgggattctcgttttccggtccaggagagcccagcggcagaggcagcagaggcagcgtgaccgcgccaccgatgtggatcgagaggacaagctgtggctgaagccttatgtggacctccaggcatacgaggaccctgcacagggagccctggactttacccgggagcttgatccagcgtggctgatggtggacactgtcataggagaaggagagtttggggaagtgtatcgagggaccctgaggctccccagccaggactgcaagactgtggccattaagaccttaaaagacacatccccaggtggccagtggtggaacttccttcgagaggcaactatcatgggccagtttagccacccgcatattctgcatctggaaggcgtcgtcacaaagcgaaagccgatcatgatcatcacagaatttatggagaatggagccctggatgccttcctgagggagcgggaggaccagctggtccctgggcagctagtggccatgctgcagggcatagcatctggcatgaactacctcagtaatcacaattatgtccaccgggacctggctgccagaaacatcttggtgaatcaaaacctgtgctgcaaggtgtctgactttggcctgactcgcctcctggatgactttgatggcacatacgaaacccagggaggaaagatccctatccgttggacagcccctgaagccattgcccatcggatcttcaccacagccagcgatgtgtggagctttgggattgtgatgtgggaggtgctgagctttggggacaagccttatggggagatgagcaatcaggaggttatgaagagcattgaggatgggtaccggttgccccctcctgtggactgccctgcccctctgtatgagctcatgaagaactgctgggcatatgaccgtgcccgccggccacacttccagaagcttcaggcacatctggagcaactgcttgccaacccccactccctgcggaccattgccaactttgaccccaggatgactcttcgcctgcccagcctgagtggctcagatgggatcccatatcgaaccgtctctgagtggctcgagtccatacgcatgaaacgctacatcctgcacttccactcggctgggctggacaccatggagtgtgtgctggagctgaccgctgaggacctgacgcagatgggaatcacactgcccgggcaccagaagcgcattctttgcagtattcagggattcaaggactgatccctcctctcaccccatgcccaatcagggtgcaaggagcaaggacggggccaaggtcgctcatggtcactccctgcgccccttcccacaacctgccagactaggctatcggtgctgcttctgcccactttcaggagaaccctgctctgcaccccagaaaacctctttgttttaaaagggaggtgggggtagaagtaaaaggatgatcatgggagggagctgaggggttaatatatatacatacatacacatatatatatttttgtaaataaacaggaactgattttctgcctccatcccacccatgagggctgcaggcactacaaaagagctgactactgagaaaaaa

SEQ ID NO: 208 - protein, 976 aa, Homo sapiens
  REGION 1..976: note = EphA1
MERRWPLGLGLVLLLCAPLPPGARAKEVTLMDTSKAQGELGWLLDPPKDGWSEQQQILNGTPLYMYQDCPMQGRRDTDHWLRSNWIYRGEEASRVHVELQFTVRDCKSFPGGAGPLGCKETFNLLYMESDQDVGIQLRRPLFQKVTTVAADQSFTIRDLASGSVKLNVERCSLGRLTRRGLYLAFHNPGACVALVSVRVFYQRCPETLNGLAQFPDTLPGPAGLVEVAGTCLPHARASPRPSGAPRMHCSPDGEWLVPVGRCHCEPGYEEGGSGEACVACPSGSYRMDMDTPHCLTCPQQSTAESEGATICTCESGHYRAPGEGPQVACTGPPSAPRNLSFSASGTQLSLRWEPPADTGGRQDVRYSVRCSQCQGTAQDGGPCQPCGVGVHFSPGARGLTTPAVHVNGLEPYANYTFNVEAQNGVSGLGSSGHASTSVSISMGHAESLSGLSLRLVKKEPRQLELTWAGSRPRSPGANLTYELHVLNQDEERYQMVLEPRVLLTELQPDTTYIVRVRMLTPLGPGPFSPDHEFRTSPPVSRGLTGGEIVAVIFGLLLGAALLLGILVFRSRRAQRQRQQRQRDRATDVDREDKLWLKPYVDLQAYEDPAQGALDFTRELDPAWLMVDTVIGEGEFGEVYRGTLRLPSQDCKTVAIKTLKDTSPGGQWWNFLREATIMGQFSHPHILHLEGVVTKRKPIMIITEFMENGALDAFLREREDQLVPGQLVAMLQGIASGMNYLSNHNYVHRDLAARNILVNQNLCCKVSDFGLTRLLDDFDGTYETQGGKIPIRWTAPEAIAHRIFTTASDVWSFGIVMWEVLSFGDKPYGEMSNQEVMKSIEDGYRLPPPVDCPAPLYELMKNCWAYDRARRPHFQKLQAHLEQLLANPHSLRTIANFDPRMTLRLPSLSGSDGIPYRTVSEWLESIRMKRYILHFHSAGLDTMECVLELTAEDLTQMGITLPGHQKRILCSIQGFKD

SEQ ID NO: 209 - DNA, 3963 bp, Homo sapiens
  misc_feature 1..3963: note = EphA2
  source 1..3963: mol_type = genomic DNA
attaaggactcggggcaggaggggcagaagttgcgcgcaggccggcgggcgggagcggacaccgaggccggcgtgcaggcgtgcgggtgtgcgggagccgggctcggggggatcggaccgagagcgagaagcgcggcatggagctccaggcagcccgcgcctgcttcgccctgctgtggggctgtgcgctggccgcggccgcggcggcgcagggcaaggaagtggtactgctggactttgctgcagctggaggggagctcggctggctcacacacccgtatggcaaagggtgggacctgatgcagaacatcatgaatgacatgccgatctacatgtactccgtgtgcaacgtgatgtctggcgaccaggacaactggctccgcaccaactgggtgtaccgaggagaggctgagcgtatcttcattgagctcaagtttactgtacgtgactgcaacagcttccctggtggcgccagctcctgcaaggagactttcaacctctactatgccgagtcggacctggactacggcaccaacttccagaagcgcctgttcaccaagattgacaccattgcgcccgatgagatcaccgtcagcagcgacttcgaggcacgccacgtgaagctgaacgtggaggagcgctccgtggggccgctcacccgcaaaggcttctacctggccttccaggatatcggtgcctgtgtggcgctgctctccgtccgtgtctactacaagaagtgccccgagctgctgcagggcctggcccacttccctgagaccatcgccggctctgatgcaccttccctggccactgtggccggcacctgtgtggaccatgccgtggtgccaccggggggtgaagagccccgtatgcactgtgcagtggatggcgagtggctggtgcccattgggcagtgcctgtgccaggcaggctacgagaaggtggaggatgcctgccaggcctgctcgcctggattttttaagtttgaggcatctgagagcccctgcttggagtgccctgagcacacgctgccatcccctgagggtgccacctcctgcgagtgtgaggaaggcttcttccgggcacctcaggacccagcgtcgatgccttgcacacgacccccctccgccccacactacctcacagccgtgggcatgggtgccaaggtggagctgcgctggacgccccctcaggacagcgggggccgcgaggacattgtctacagcgtcacctgcgaacagtgctggcccgagtctggggaatgcgggccgtgtgaggccagtgtgcgctactcggagcctcctcacggactgacccgcaccagtgtgacagtgagcgacctggagccccacatgaactacaccttcaccgtggaggcccgcaatggcgtctcaggcctggtaaccagccgcagcttccgtactgccagtgtcagcatcaaccagacagagccccccaaggtgaggctggagggccgcagcaccacctcgcttagcgtctcctggagcatccccccgccgcagcagagccgagtgtggaagtacgaggtcacttaccgcaagaagggagactccaacagctacaatgtgcgccgcaccgagggtttctccgtgaccctggacgacctggccccagacaccacctacctggtccaggtgcaggcactgacgcaggagggccagggggccggcagcaaggtgcacgaattccagacgctgtccccggagggatctggcaacttggcggtgattggcggcgtggctgtcggtgtggtcctgcttctggtgctggcaggagttggcttctttatccaccgcaggaggaagaaccagcgtgcccgccagtccccggaggacgtttacttctccaagtcagaacaactgaagcccctgaagacatacgtggacccccacacatatgaggaccccaaccaggctgtgttgaagttcactaccgagatccatccatcctgtgtcactcggcagaaggtgatcggagcaggagagtttggggaggtgtacaagggcatgctgaagacatcctcggggaagaaggaggtgccggtggccatcaagacgctgaaagccggctacacagagaagcagcgagtggacttcctcggcgaggccggcatcatgggccagttcagccaccacaacatcatccgcctagagggcgtcatctccaaatacaagcccatgatgatcatcactgagtacatggagaatggggccctggacaagttccttcgggagaaggatggcgagttcagcgtgctgcagctggtgggcatgctgcggggcatcgcagctggcatgaagtacctggccaacatgaactatgtgcaccgtgacctggctgcccgcaacatcctcgtcaacagcaacctggtctgcaaggtgtctgactttggcctgtcccgcgtgctggaggacgaccccgaggccacctacaccaccagtggcggcaagatccccatccgctggaccgccccggaggccatttcctaccggaagttcacctctgccagcgacgtgtggagctttggcattgtcatgtgggaggtgatgacctatggcgagcggccctactgggagttgtccaaccacgaggtgatgaaagccatcaatgatggcttccggctccccacacccatggactgcccctccgccatctaccagctcatgatgcagtgctggcagcaggagcgtgcccgccgccccaagttcgctgacatcgtcagcatcctggacaagctcattcgtgcccctgactccctcaagaccctggctgactttgacccccgcgtgtctatccggctccccagcacgagcggctcggagggggtgcccttccgcacggtgtccgagtggctggagtccatcaagatgcagcagtatacggagcacttcatggcggccggctacactgccatcgagaaggtggtgcagatgaccaacgacgacatcaagaggattggggtgcggctgcccggccaccagaagcgcatcgcctacagcctgctgggactcaaggaccaggtgaacactgtggggatccccatctgagcctcgacagggcctggagccccatcggccaagaatacttgaagaaacagagtggcctccctgctgtgccatgctgggccactggggactttatttatttctagttctttcctccccctgcaacttccgctgaggggtctcggatgacaccctggcctgaactgaggagatgaccagggatgctgggctgggccctctttccctgcgagacgcacacagctgagcacttagcaggcaccgccacgtcccagcatccctggagcaggagccccgccacagccttcggacagacatataggatattcccaagccgaccttccctccgccttctcccacatgaggccatctcaggagatggagggcttggcccagcgccaagtaaacagggtacctcaagccccatttcctcacactaagagggcagactgtgaacttgactgggtgagacccaaagcggtccctgtccctctagtgccttctttagaccctcgggccccatcctcatccctgactggccaaacccttgctttcctgggcctttgcaagatgcttggttgtgttgaggtttttaaatatatattttgtactttgtggagagaatgtgtgtgtgtggcagggggccccgccagggctggggacagagggtgtcaaacattcgtgagctggggactcagggaccggtgctgcaggagtgtcctgcccatgccccagtcggccccatctctcatccttttggataagtttctattctgtcagtgttaaagattttgttttgttggacatttttttcgaatcttaatttattattttttttatatttattgttagaaaatgacttatttctgctctggaataaagttgcagatgattcaaaccgaaaaaaaaaaaaaaaaaa

SEQ ID NO: 210 - protein, 976 aa, Homo sapiens
  REGION 1..976: note = EphA2
MELQAARACFALLWGCALAAAAAAQGKEVVLLDFAAAGGELGWLTHPYGKGWDLMQNIMNDMPIYMYSVCNVMSGDQDNWLRTNWVYRGEAERIFIELKFTVRDCNSFPGGASSCKETFNLYYAESDLDYGTNFQKRLFTKIDTIAPDEITVSSDFEARHVKLNVEERSVGPLTRKGFYLAFQDIGACVALLSVRVYYKKCPELLQGLAHFPETIAGSDAPSLATVAGTCVDHAVVPPGGEEPRMHCAVDGEWLVPIGQCLCQAGYEKVEDACQACSPGFFKFEASESPCLECPEHTLPSPEGATSCECEEGFFRAPQDPASMPCTRPPSAPHYLTAVGMGAKVELRWTPPQDSGGREDIVYSVTCEQCWPESGECGPCEASVRYSEPPHGLTRTSVTVSDLEPHMNYTFTVEARNGVSGLVTSRSFRTASVSINQTEPPKVRLEGRSTTSLSVSWSIPPPQQSRVWKYEVTYRKKGDSNSYNVRRTEGFSVTLDDLAPDTTYLVQVQALTQEGQGAGSKVHEFQTLSPEGSGNLAVIGGVAVGVVLLLVLAGVGFFIHRRRKNQRARQSPEDVYFSKSEQLKPLKTYVDPHTYEDPNQAVLKFTTEIHPSCVTRQKVIGAGEFGEVYKGMLKTSSGKKEVPVAIKTLKAGYTEKQRVDFLGEAGIMGQFSHHNIIRLEGVISKYKPMMIITEYMENGALDKFLREKDGEFSVLQLVGMLRGIAAGMKYLANMNYVHRDLAARNILVNSNLVCKVSDFGLSRVLEDDPEATYTTSGGKIPIRWTAPEAISYRKFTSASDVWSFGIVMWEVMTYGERPYWELSNHEVMKAINDGFRLPTPMDCPSAIYQLMMQCWQQERARRPKFADIVSILDKLIRAPDSLKTLADFDPRVSIRLPSTSGSEGVPFRTVSEWLESIKMQQYTEHFMAAGYTAIEKVVQMTNDDIKRIGVRLPGHQKRIAYSLLGLKDQVNTVGIPI

SEQ ID NO: 211 - DNA, 5826 bp, Homo sapiens
  regulatory 1: note = enhancer - EphA3; regulatory_class = enhancer
  source 1..5826: mol_type = genomic DNA
cccgctctgcttcagcgcacgctgaagacggcactaggacccagggaagtccccgagcggggttcgcggaaaggcagccagactcctccttatctccagtgtcaaacttgacatcagcctgcgagcggagcatggtaacttctccagcaatcagagcgctccccctcacatcagtggcatgcttcatggagatatgctcctctcactgccctctgcaccagcaacatggattgtcagctctccatcctcctccttctcagctgctctgttctcgacagcttcggggaactgattccgcagccttccaatgaagtcaatctactggattcaaaaacaattcaaggggagctgggctggatctcttatccatcacatgggtgggaagagatcagtggtgtggatgaacattacacacccatcaggacttaccaggtgtgcaatgtcatggaccacagtcaaaacaattggctgagaacaaactgggtccccaggaactcagctcagaagatttatgtggagctcaagttcactctacgagactgcaatagcattccattggttttaggaacttgcaaggagacattcaacctgtactacatggagtctgatgatgatcatggggtgaaatttcgagagcatcagtttacaaagattgacaccattgcagctgatgaaagtttcactcaaatggatcttggggaccgtattctgaagctcaacactgagattagagaagtaggtcctgtcaacaagaagggattttatttggcatttcaagatgttggtgcttgtgttgccttggtgtctgtgagagtatacttcaaaaagtgcccatttacagtgaagaatctggctatgtttccagacacggtacccatggactcccagtccctggtggaggttagagggtcttgtgtcaacaattctaaggaggaagatcctccaaggatgtactgcagtacagaaggcgaatggcttgtacccattggcaagtgttcctgcaatgctggctatgaagaaagaggttttatgtgccaagcttgtcgaccaggtttctacaaggcattggatggtaatatgaagtgtgctaagtgcccgcctcacagttctactcaggaagatggttcaatgaactgcaggtgtgagaataattacttccgggcagacaaagaccctccatccatggcttgtacccgacctccatcttcaccaagaaatgttatctctaatataaacgagacctcagttatcctggactggagttggcccctggacacaggaggccggaaagatgttaccttcaacatcatatgtaaaaaatgtgggtggaatataaaacagtgtgagccatgcagcccaaatgtccgcttcctccctcgacagtttggactcaccaacaccacggtgacagtgacagaccttctggcacatactaactacacctttgagattgatgccgttaatggggtgtcagagctgagctccccaccaagacagtttgctgcggtcagcatcacaactaatcaggctgctccatcacctgtcctgacgattaagaaagatcggacctccagaaatagcatctctttgtcctggcaagaacctgaacatcctaatgggatcatattggactacgaggtcaaatactatgaaaagcaggaacaagaaacaagttataccattctgagggcaagaggcacaaatgttaccatcagtagcctcaagcctgacactatatacgtattccaaatccgagcccgaacagccgctggatatgggacgaacagccgcaagtttgagtttgaaactagtccagactctttctccatctctggtgaaagtagccaagtggtcatgatcgccatttcagcggcagtagcaattattctcctcactgttgtcatctatgttttgattgggaggttctgtggctataagtcaaaacatggggcagatgaaaaaagacttcattttggcaatgggcatttaaaacttccaggtctcaggacttatgttgacccacatacatatgaagaccctacccaagctgttcatgagtttgccaaggaattggatgccaccaacatatccattgataaagttgttggagcaggtgaatttggagaggtgtgcagtggtcgcttaaaacttccttcaaaaaaagagatttcagtggccattaagaccctgaaagttggctacacagaaaagcagaggagagacttcctgggagaagcaagcattatgggacagtttgaccaccccaatatcattcgactggaaggagttgttaccaaaagtaagccagttatgattgtcacagaatacatggagaatggttccttggatagtttcctacgtaaacacgatgcccagtttactgtcattcagctagtggggatgcttcgagggatagcatctggcatgaagtacctgtcagacatgggctatgttcaccgagacctcgctgctcggaacatcttgatcaacagtaacttggtgtgtaaggtttctgatttcggactttcgcgtgtcctggaggatgacccagaagctgcttatacaacaagaggagggaagatcccaatcaggtggacatcaccagaagctatagcctaccgcaagttcacgtcagccagcgatgtatggagttatgggattgttctctgggaggtgatgtcttatggagagagaccatactgggagatgtccaatcaggatgtaattaaagctgtagatgagggctatcgactgccaccccccatggactgcccagctgccttgtatcagctgatgctggactgctggcagaaagacaggaacaacagacccaagtttgagcagattgttagtattctggacaagcttatccggaatcccggcagcctgaagatcatcaccagtgcagccgcaaggccatcaaaccttcttctggaccaaagcaatgtggatatcactaccttccgcacaacaggtgactggcttaatggtgtctggacagcacactgcaaggaaatcttcacgggtgtggagtacagttcttgtgacacaatagccaagatttccacagatgacatgaaaaaggttggtgtcaccgtggttgggccacagaagaagatcatcagtagcattaaagctctagaaacgcaatcaaagaatggcccagttcccgtgtaaagcacgggacggaagtgcttctggacggaagtggtggctgtggaaggcgtagcatcatcctgcagacagacaataattctggagatactggtggaagttccaagtccaataagacactcaaatatgagtacaaatgccttaaaatggaattgaaaaactctttattttcccctatcatttattggatgggtgggtggggtatttttttgtaattgcttttttaaatattagttaatggattaaatttaattcttcagcgtaaaatggtgaagaactagcatatagccattgatcataaactgactatcataaaatcaaaacaagtgaaataacaaaatggacatggtggctttgtttaggtagagccacaaaagaaaagacttgtaatatttttatatacagaggaaatctgtaacaggtattttgtttcttttaaagcaagcaacacagaggaatttatacctcaaactatctggccatatttactaccttatcactgcattattctcttttatctgtttaaagcatatagagatgaagtttgtagttgttttaagtactacacatttttaaattgttagcttccttaagtatatcatgtaaagaaatgtcttaatttttgaaaaaagtacatatttattttcttttgaattgtttttattgttttctatttatgccttgatgatttaatatggatttgttacagccaagtgccaaatgctctctcaaattgtcagcaatttaactagacacagataataatgggtttctttcagattttttgaaccatccacttacatatatttttaaaaaatgaaatccttttcctgttcatacactaaccaaatctctcaaatctgttatcccaatcattgttgcctctccgtttattataaactgtatgctcacaacttagtgtaatataccagcttgtatgcaatggattttcaaccagataacatacctttcctgctctggtgcttagagactatcaactccctcctttagtgaaggagccgtgttagagcttccgagaatagctccactggagagaagtggaatcctatatagaatgctgcactaattgacaacacagcctataggccaatgcatgagtaaaaaaaaaaacaattactggctcactggctttgaaaagtcacttactattgttgctgaaacttgctgagctgtttatagagaatgatgataacagaacttttcctctgtatcactggtgtttaggtgaattaattaaacattgtgatcattagtaccaggtattattatctttaagagtcttccacttcaatgcacatggtgcagttttggtgtgtaacttagaaggattgaacttctttgaatttactggacataacattttcagaatagttggtcatctagcaaccgcctcaaaatgtgtaagcaggagagaaatttctcatcacagggatttagacttactattacataaaggctaactatgagcttgctcattaattttgaaaagatgtacctggtggatatctagctagtaatatattctgaagcaacattttagctctattgatactctttctaatgctgatatgatcttgagtataagaaatgcatatgtcactagaatggataaaataatgctgcaaacttaatgttcttatgcaaaatggaacgctaatgaaacacagcttacaatcgcaaatcaaaactcacaagtgctcatctgttgtagatttagtgtaataagacttagattgtgctccttcggatatgattgtttctcaaatcttggcaatattccttagtcaaatcaggctactagaattctgtattggatatataagagcatgaaatttttaaaaatacacttgtgattataaaattaatcacaaatttcacttatacctgctatcagcagctagaaaacattttttttttaaatcaagtattttgtgtttggaatgttagaatgagatctgaatgtggtttcaatctaattttttcccagactactattttcttttttaggtactattctgagcatactcaacaaaacccatgcatttcataaactaatagaagttgaggattgttgaatctatttcacttattttggctgtggtttccatctgaaagtagaggttgtatacaccatatactgttcttcattttattaatatttttctccttgacctctcataaatttactttacacaattcttaccctgtacatatgtaaacataagtgtacgattcttaaccatggagtagaggtactagaatgcttacggccatctctttgtacaggaactgcattgactttcagtaaacataaagccacaactcctacatgatgttatgtaccatatgatctgttttgtatcttaaatttgatttacatatattatttatttctggtaactcactcagtttatgctgtgctaaatatcaatcaagccatgtataaatgtgatatgattggcaatatgtgtttactttaaacttgtcttttcaaaatattactcagtttatgttgtacaatgtagatggcctcttactaatgtaaaatgatttgtagtggaaacatttatatttttataataaacataatgaaaatattttttacagattggaaaaaaaaaaaaaaaaaaa

SEQ ID NO: 212 - protein, 983 aa, Homo sapiens
  REGION 1..983: note = EphA3
MDCQLSILLLLSCSVLDSFGELIPQPSNEVNLLDSKTIQGELGWISYPSHGWEEISGVDEHYTPIRTYQVCNVMDHSQNNWLRTNWVPRNSAQKIYVELKFTLRDCNSIPLVLGTCKETFNLYYMESDDDHGVKFREHQFTKIDTIAADESFTQMDLGDRILKLNTEIREVGPVNKKGFYLAFQDVGACVALVSVRVYFKKCPFTVKNLAMFPDTVPMDSQSLVEVRGSCVNNSKEEDPPRMYCSTEGEWLVPIGKCSCNAGYEERGFMCQACRPGFYKALDGNMKCAKCPPHSSTQEDGSMNCRCENNYFRADKDPPSMACTRPPSSPRNVISNINETSVILDWSWPLDTGGRKDVTFNIICKKCGWNIKQCEPCSPNVRFLPRQFGLTNTTVTVTDLLAHTNYTFEIDAVNGVSELSSPPRQFAAVSITTNQAAPSPVLTIKKDRTSRNSISLSWQEPEHPNGIILDYEVKYYEKQEQETSYTILRARGTNVTISSLKPDTIYVFQIRARTAAGYGTNSRKFEFETSPDSFSISGESSQVVMIAISAAVAIILLTVVIYVLIGRFCGYKSKHGADEKRLHFGNGHLKLPGLRTYVDPHTYEDPTQAVHEFAKELDATNISIDKVVGAGEFGEVCSGRLKLPSKKEISVAIKTLKVGYTEKQRRDFLGEASIMGQFDHPNIIRLEGVVTKSKPVMIVTEYMENGSLDSFLRKHDAQFTVIQLVGMLRGIASGMKYLSDMGYVHRDLAARNILINSNLVCKVSDFGLSRVLEDDPEAAYTTRGGKIPIRWTSPEAIAYRKFTSASDVWSYGIVLWEVMSYGERPYWEMSNQDVIKAVDEGYRLPPPMDCPAALYQLMLDCWQKDRNNRPKFEQIVSILDKLIRNPGSLKIITSAAARPSNLLLDQSNVDITTFRTTGDWLNGVWTAHCKEIFTGVEYSSCDTIAKISTDDMKKVGVTVVGPQKKIISSIKALETQSKNGPVPV

SEQ ID NO: 213 - DNA, 6364 bp, Homo sapiens
  misc_feature 1..6364: note = EphA4
  source 1..6364: mol_type = genomic DNA
ctgggatagaagcggcaggagcagcgttggcaccggcgaaccatggctgggattttctatttcgccctattttcgtgtctcttcgggatttgcgacgctgtcacaggttccagggtataccccgcgaatgaagttaccttattggattccagatctgttcagggagaacttgggtggatagcaagccctctggaaggagggtgggaggaagtgagtatcatggatgaaaaaaatacaccaatccgaacctaccaagtgtgcaatgtgatggaacccagccagaataactggctacgaactgattggatcacccgagaaggggctcagagggtgtatattgagattaaattcaccttgagggactgcaatagtcttccgggcgtcatggggacttgcaaggagacgtttaacctgtactactatgaatcagacaacgacaaagagcgtttcatcagagagaaccagtttgtcaaaattgacaccattgctgctgatgagagcttcacccaagtggacattggtgacagaatcatgaagctgaacaccgagatccgggatgtagggccattaagcaaaaaggggttttacctggcttttcaggatgtgggggcctgcatcgccctggtatcagtccgtgtgttctataaaaagtgtccactcacagtccgcaatctggcccagtttcctgacaccatcacaggggctgatacgtcttccctggtggaagttcgaggctcctgtgtcaacaactcagaagagaaagatgtgccaaaaatgtactgtggggcagatggtgaatggctggtacccattggcaactgcctatgcaacgctgggcatgaggagcggagcggagaatgccaagcttgcaaaattggatattacaaggctctctccacggatgccacctgtgccaagtgcccaccccacagctactctgtctgggaaggagccacctcgtgcacctgtgaccgaggctttttcagagctgacaacgatgctgcctctatgccctgcacccgtccaccatctgctcccctgaacttgatttcaaatgtcaacgagacatctgtgaacttggaatggagtagccctcagaatacaggtggccgccaggacatttcctataatgtggtatgcaagaaatgtggagctggtgaccccagcaagtgccgaccctgtggaagtggggtccactacaccccacagcagaatggcttgaagaccaccaaagtctccatcactgacctcctagctcataccaattacacctttgaaatctgggctgtgaatggagtgtccaaatataaccctaacccagaccaatcagtttctgtcactgtgaccaccaaccaagcagcaccatcatccattgctttggtccaggctaaagaagtcacaagatacagtgtggcactggcttggctggaaccagatcggcccaatggggtaatcctggaatatgaagtcaagtattatgagaaggatcagaatgagcgaagctatcgtatagttcggacagctgccaggaacacagatatcaaaggcctgaaccctctcacttcctatgttttccacgtgcgagccaggacagcagctggctatggagacttcagtgagcccttggaggttacaaccaacacagtgccttcccggatcattggagatggggctaactccacagtccttctggtctctgtctcgggcagtgtggtgctggtggtaattctcattgcagcttttgtcatcagccggagacggagtaaatacagtaaagccaaacaagaagcggatgaagagaaacatttgaatcaaggtgtaagaacatatgtggacccctttacgtacgaagatcccaaccaagcagtgcgagagtttgccaaagaaattgacgcatcctgcattaagattgaaaaagttataggagttggtgaatttggtgaggtatgcagtgggcgtctcaaagtgcctggcaagagagagatctgtgtggctatcaagactctgaaagctggttatacagacaaacagaggagagacttcctgagtgaggccagcatcatgggacagtttgaccatccgaacatcattcacttggaaggcgtggtcactaaatgtaaaccagtaatgatcataacagagtacatggagaatggctccttggatgcattcctcaggaaaaatgatggcagatttacagtcattcagctggtgggcatgcttcgtggcattgggtctgggatgaagtatttatctgatatgagctatgtgcatcgtgatctggccgcacggaacatcctggtgaacagcaacttggtctgcaaagtgtctgattttggcatgtcccgagtgcttgaggatgatccggaagcagcttacaccaccaggggtggcaagattcctatccggtggactgcgccagaagcaattgcctatcgtaaattcacatcagcaagtgatgtatggagctatggaatcgttatgtgggaagtgatgtcgtacggggagaggccctattgggatatgtccaatcaagatgtgattaaagccattgaggaaggctatcggttaccccctccaatggactgccccattgcgctccaccagctgatgctagactgctggcagaaggagaggagcgacaggcctaaatttgggcagattgtcaacatgttggacaaactcatccgcaaccccaacagcttgaagaggacagggacggagagctccagacctaacactgccttgttggatccaagctcccctgaattctctgctgtggtatcagtgggcgattggctccaggccattaaaatggaccggtataaggataacttcacagctgctggttataccacactagaggctgtggtgcacgtgaaccaggaggacctggcaagaattggtatcacagccatcacgcaccagaataagattttgagcagtgtccaggcaatgcgaacccaaatgcagcagatgcacggcagaatggttcccgtctgagccagtactgaataaactcaaaactcttgaaattagtttacctcatccatgcactttaattgaagaactgcactttttttacttcgtcttcgccctctgaaattaaagaaatgaaaaaaaaaaacaatatctgcagcgttgcttggtgcacagattgctgaaactgtggggcttacagaaatgactgccggtcatttgaatgagacctggaacaaatcgtttctcagaagtacttttctgttcatcaccagtctgtaaaatacatgtacctatagaaatagaacactgcctctgagttttgatgctgtatttgctgccagacactgagcttctgagacatccctgattctctctccatttggaattacaaccattgtattttgtttgtggcataaattacagtcatctgtctttcactggaatgaagaccatgcctaggaacattttttaaggactcagctgtggcttttagggcttggttcataccatgggggaaaaaaaagtcctaggagaaagcgacgtggctcattagtgttgcctcttcagtgctcaagccgcctggtggattcctatgacacagggggcctggaaagaaagggaaagtggatttaaaatatatatatacgtaacccaagccccataacccctaactggacaaatgaggtctgtttctttgggcctgaggctgtgccatataaagtcttattttgggactttacaaacttgtcctaactatcttgtggatagtgggctgtgacaatctggaatagagaacgttcacacttcgctcctttaaagaagcgaccccagatctgcaagggagtagattctgctatcttggcctcacagcccttcctgttgattacaaagcccgtggaagaaaacagaacacaccctcctcagttccgtctaaatgtgtttcttctgcttcaattacaccagttctggggcaaagacactgatgaaacaacacccatacctgaaaagaataaatgtgtgactttcaaatcccctttcgcagtgaaagaaacagcaaacacttaagattcagcatctgttctccagttgcactgaggaatgcactgtctcgcagcaccagctctgcagagcccttgccccagactctttgcggttttatttatatgtatttccatatttcattcctgtgtgtcactgctgcattggtgtggcagcaagtgaccaaatgctacaggtcttactatggacaccaggtcaggtgcaaccacacaaaacaaagccagttccatgagctgcctatgatatgcattgcggaagtaacattttacccagggtgtgccattgcagtgatataaatatatttttttcttagactaaatatgagctgactatctcttttgatgtgtgtacataggtgtgagtgtgtgtgtatgcgtgcctgtctgtgtgcgggtgtgtgtatgtgcatagcctcatgcttaggactacccatgaatgttgtggaatgctacacctggagagttctggttttccaccagtttcaagatgaagaactacatgatacagtggacctggagaccatccccttggaaagacaacccagagatgttcagcatcctgtatctacacgcatcctgtatctacacgtgtattttgtagctgtcacactaaccttaataagaattctacagctttggacagaggcattttcaccttaatggtgaagtaatttaaaatataaatccattcaggtgacaacccatcatcaaaattacaaattttctgattgaactcatctgaatcatcagttccttgatggagagagagaaggagatggaatgtgtctggtaaccccaaatggagtacaagtagcctttgttttcctgcataaatggacttgttgaatgcgaacgaatatatgcaattcatatacttttggagatgaacgtagatatgtgtgtcagctttgagatggtgtgtcctggattaatactttgtctcccaatatcacagaaaaatacatgccagtgactcttgaggttaaggtagttgggatgaaatggcctcaggcaatttcacattccctaattacctggaaagttctacagtaattaatatgcagctaactcctgttgccctcacaagagcatcagccttctagaatcggagctccggagtgtgaagattcagtattgatatgatatgtataccaaactccagccaacttactgccatttttcataatctgagtggctgccttgcttatcctaagctgtggttgcagaaaccgtggccatttatataagctataacatcaaatcagggaaaaatgaggaaaaaaaatagattctgaaccatttattgttgaataagtagagaaaatcatcaataaatatttattacattctgacagggtgtgtggcattgtgttctatgccagagtgacaaagttgattcacccctttttggggaccttaatatattttttaagggatgtgcctatgcattgatgcctgaaaaatatgtataaagaaatgaggttgactcttctgagcagttcatcttttccagaggtaagggtaggaggccaacttcagggtctgggtctgagcccgtgggcaagccctggccgagtgagctccaatgctaactcatgtgccgatctctagagcagtgggaaactaccccgctgcaccaaatcaagtagcttcaccttgtgtatgcaggccccaagttattttttagcaatcttacgagtgaaatgttctggtgggttgaaaaacgttcttattttaaagaaaggttgtgctcgctacactgctggtgtgtgcattctgagacctcttgtattcaatctgtgaaggatatgtgtattaatccgtacacccgtatagcctcaatatttgtctgaagacacttaaattctgacccataaaggaaagttctagaagcaatattttcacttatttaacattctccaaacaacatcaagcattgatacacactgaagagtgcgtttattttttgtatcactctaagtatgttggaatatgcaaggactgtggttcaaattagaatgtataaggcatattataatttagttcatactgaataagaaattaacagaacattgttcggttcacacgttccaaactttgagtgatttctggagttagacatagattttctattttgttttaatttgtcaaggtatttttcttcccttcatgaactttaggtacacataacttatgtcatttatttatggtcttttatacctagtttgtaaaattgtaaaatagcaaactaaatgcaaagagtttgcatttgaaaataataaagtagttgccgtatacaaccctgcaaaaaaaaaaaaaaaaaa

SEQ ID NO: 214 - protein, 986 aa, Homo sapiens
  REGION 1..986: note = EphA4
MAGIFYFALFSCLFGICDAVTGSRVYPANEVTLLDSRSVQGELGWIASPLEGGWEEVSIMDEKNTPIRTYQVCNVMEPSQNNWLRTDWITREGAQRVYIEIKFTLRDCNSLPGVMGTCKETFNLYYYESDNDKERFIRENQFVKIDTIAADESFTQVDIGDRIMKLNTEIRDVGPLSKKGFYLAFQDVGACIALVSVRVFYKKCPLTVRNLAQFPDTITGADTSSLVEVRGSCVNNSEEKDVPKMYCGADGEWLVPIGNCLCNAGHEERSGECQACKIGYYKALSTDATCAKCPPHSYSVWEGATSCTCDRGFFRADNDAASMPCTRPPSAPLNLISNVNETSVNLEWSSPQNTGGRQDISYNVVCKKCGAGDPSKCRPCGSGVHYTPQQNGLKTTKVSITDLLAHTNYTFEIWAVNGVSKYNPNPDQSVSVTVTTNQAAPSSIALVQAKEVTRYSVALAWLEPDRPNGVILEYEVKYYEKDQNERSYRIVRTAARNTDIKGLNPLTSYVFHVRARTAAGYGDFSEPLEVTTNTVPSRIIGDGANSTVLLVSVSGSVVLVVILIAAFVISRRRSKYSKAKQEADEEKHLNQGVRTYVDPFTYEDPNQAVREFAKEIDASCIKIEKVIGVGEFGEVCSGRLKVPGKREICVAIKTLKAGYTDKQRRDFLSEASIMGQFDHPNIIHLEGVVTKCKPVMIITEYMENGSLDAFLRKNDGRFTVIQLVGMLRGIGSGMKYLSDMSYVHRDLAARNILVNSNLVCKVSDFGMSRVLEDDPEAAYTTRGGKIPIRWTAPEAIAYRKFTSASDVWSYGIVMWEVMSYGERPYWDMSNQDVIKAIEEGYRLPPPMDCPIALHQLMLDCWQKERSDRPKFGQIVNMLDKLIRNPNSLKRTGTESSRPNTALLDPSSPEFSAVVSVGDWLQAIKMDRYKDNFTAAGYTTLEAVVHVNQEDLARIGITAITHQNKILSSVQAMRTQMQQMHGRMVPV

SEQ ID NO: 215 - DNA, 3162 bp, Homo sapiens
  misc_feature 1..3162: note = EphA5
  source 1..3162: mol_type = genomic DNA
ccagcgtccctggccggctgctactctgcacctcgacgggctcccctctggacgtgccttctcctgtgcgccgcactccggaccctcctggccagccccagcaacgaagtgaatttattggattcacgcactgtcatgggggacctgggatggattgcttttccaaaaaatgggtgggaagagattggtgaagtggatgaaaattatgcccctatccacacataccaagtatgcaaagtgatggaacagaatcagaataactggcttttgaccagttggatctccaatgaaggtgcttccagaatcttcatagaactcaaatttaccctgcgggactgcaacagccttcctggaggactggggacctgtaaggaaacctttaatatgtattactttgagtcagatgatcagaatgggagaaacatcaaggaaaaccaatacatcaaaattgataccattgctgccgatgaaagctttacagaacttgatcttggtgaccgtgttatgaaactgaatacagaggtcagagatgtaggacctctaagcaaaaagggattttatcttgcttttcaagatgttggtgcttgcattgctctggtttctgtgcgtgtatactataaaaaatgcccttctgtggtacgacacttggctgtcttccctgacaccatcactggagctgattcttcccaattgctcgaagtgtcaggctcctgtgtcaaccattctgtgaccgatgaacctcccaaaatgcactgcagcgccgaaggggagtggctggtgcccatcgggaaatgcatgtgcaaggcaggatatgaagagaaaaatggcacctgtcaagtgtgcagacctgggttcttcaaagcctcacctcacatccagagctgcggcaaatgtccacctcacagttatacccatgaggaagcttcaacctcttgtgtctgtgaaaaggattatttcaggagagagtctgatccacccacaatggcatgcacaagacccccctctgctcctcggaatgccatctcaaatgttaatgaaactagtgtctttctggaatggattccgcctgctgacactggtggaaggaaagacgtgtcatattatattgcatgcaagaagtgcaactcccatgcaggtgtgtgtgaggagtgtggcggtcatgtcaggtaccttccccggcaaagcggcctgaaaaacacctctgtcatgatggtggatctactcgctcacacaaactatacctttgagattgaggcagtgaatggagtgtccgacttgagcccaggagcccggcagtatgtgtctgtaaatgtaaccacaaatcaagcagctccatctccagtcaccaatgtgaaaaaagggaaaattgcaaaaaacagcatctctttgtcttggcaagaaccagatcgtcccaatggaatcatcctagagtatgaaatcaagcattttgaaaaggaccaagagaccagctacacgattatcaaatctaaagagacaactattactgcagagggcttgaaaccagcttcagtttatgtcttccaaattcgagcacgtacagcagcaggctatggtgtcttcagtcgaagatttgagtttgaaaccaccccagtgtttgcagcatccagcgatcaaagccagattcctgtaattgctgtgtctgtgacagtaggagtcattttgttggcagtggttatcggcgtcctcctcagtggaaggcggtgtggctacagcaaagcaaaacaagatccagaagaggaaaagatgcattttcataatgggcacattaaactgccaggagtaagaacttacattgatccacatacctatgaggatcccaatcaagctgtccacgaatttgccaaggagatagaagcatcatgtatcaccattgagagagttattggagcaggtgaatttggtgaagtttgtagtggacgtttgaaactaccaggaaaaagagaattacctgtggctatcaaaacccttaaagtaggctatactgaaaagcaacgcagagatttcctaggtgaagcaagtatcatgggacagtttgatcatcctaacatcatccatttagaaggtgtggtgaccaaaagtaaaccagtgatgatcgtgacagagtatatggagaatggctctttagatacatttttgaagaaaaacgatgggcagttcactgtgattcagcttgttggcatgctgagaggtatctctgcaggaatgaagtacctttctgacatgggctatgtgcatagagatcttgctgccagaaacatcttaatcaacagtaaccttgtgtgcaaagtgtctgactttggactttcccgggtactggaagatgatcccgaggcagcctacaccacaaggggaggaaaaattccaatcagatggactgccccagaagcaatagctttccgaaagtttacttctgccagtgatgtctggagttatggaatagtaatgtgggaagttgtgtcttatggagagagaccctactgggagatgaccaatcaagatgtgattaaagcggtagaggaaggctatcgtctgccaagccccatggattgtcctgctgctctctatcagttaatgctggattgctggcagaaagagcgaaatagcaggcccaagtttgatgaaatagtcaacatgttggacaagctgatacgtaacccaagtagtctgaagacgctggttaatgcatcctgcagagtatctaatttattggcagaacatagcccactaggatctggggcctacagatcagtaggtgaatggctagaggcaatcaagatgggccggtatacagagattttcatggaaaatggatacagttcaatggacgctgtggctcaggtgaccttggaggatttgagacggcttggagtgactcttgtcggtcaccagaagaagatcatgaacagccttcaagaaatgaaggtgcagctggtaaacggaatggtgccattgtaacttcatgtaaatgtcgcttcttcaagtgaatgattctgcactttgtaaacagcactgagatttattttaacaaaaaaagggggaaaagggaaaacagtgatttctaaaccttagaaaacatttgcctcagccacagaatttgtaatcatggttttactgaagtatccagttcttagtccttagtct

SEQ ID NO: 216 - protein, 1037 aa, Homo sapiens
  REGION 1..1037: note = EphA5
MRGSGPRGAGHRRPPSGGGDTPITPASLAGCYSAPRRAPLWTCLLLCAALRTLLASPSNEVNLLDSRTVMGDLGWIAFPKNGWEEIGEVDENYAPIHTYQVCKVMEQNQNNWLLTSWISNEGASRIFIELKFTLRDCNSLPGGLGTCKETFNMYYFESDDQNGRNIKENQYIKIDTIAADESFTELDLGDRVMKLNTEVRDVGPLSKKGFYLAFQDVGACIALVSVRVYYKKCPSVVRHLAVFPDTITGADSSQLLEVSGSCVNHSVTDEPPKMHCSAEGEWLVPIGKCMCKAGYEEKNGTCQVCRPGFFKASPHIQSCGKCPPHSYTHEEASTSCVCEKDYFRRESDPPTMACTRPPSAPRNAISNVNETSVFLEWIPPADTGGRKDVSYYIACKKCNSHAGVCEECGGHVRYLPRQSGLKNTSVMMVDLLAHTNYTFEIEAVNGVSDLSPGARQYVSVNVTTNQAAPSPVTNVKKGKIAKNSISLSWQEPDRPNGIILEYEIKHFEKDQETSYTIIKSKETTITAEGLKPASVYVFQIRARTAAGYGVFSRRFEFETTPVFAASSDQSQIPVIAVSVTVGVILLAVVIGVLLSGSCCECGCGRASSLCAVAHPILIWRCGYSKAKQDPEEEKMHFHNGHIKLPGVRTYIDPHTYEDPNQAVHEFAKEIEASCITIERVIGAGEFGEVCSGRLKLPGKRELPVAIKTLKVGYTEKQRRDFLGEASIMGQFDHPNIIHLEGVVTKSKPVMIVTEYMENGSLDTFLKKNDGQFTVIQLVGMLRGISAGMKYLSDMGYVHRDLAARNILINSNLVCKVSDFGLSRVLEDDPEAAYTTRGGKIPIRWTAPEAIAFRKFTSASDVWSYGIVMWEVVSYGERPYWEMTNQDVIKAVEEGYRLPSPMDCPAALYQLMLDCWQKERNSRPKFDEIVNMLDKLIRNPSSLKTLVNASCRVSNLLAEHSPLGSGAYRSVGEWLEAIKMGRYTEIFMENGYSSMDAVAQVTLEDLRRLGVTLVGHQKKIMNSLQEMKVQLVNGMVPL

SEQ ID NO: 217 - DNA, 1619 bp, Homo sapiens
  misc_feature 1..1619: note = EphA6
  source 1..1619: mol_type = genomic DNA
aggaaagctaagacaaacaaaactacaatggaagaagaaaacgtcctcaactagacatctgccaaaaatatcatccagaatgccctggcaagttcacttccatttagtgaagtgagataatttggcaattcacgcaagagactgagaaccaagcctcaagccctgcctctgattctgcaggtatggaacatgagcagctgacctactcttccacaaggtccaaagcccccagtgtcatcatcacaggtcttaagccagccaccaaatatgtatttcacatccgagtgagaactgcgacaggatacagtggctacagtcagaaatttgaatttgaaacaggagatgaaagactctccatttcaagtgacaaaactgtactggcttaatgaaaagtgggactttattgcctcagcttctgacatggcagcagaacaaggacagattctcgtgatagccaccgccgctgttggcggattcactctcctcgtcatcctcactttattcttcttgatcactgggagatgtcagtggtacataaaagccaagatgaagtcagaagagaagagaagaaaccacttacagaatgggcatttgcgcttcccgggaattaaaacttacattgatccagatacatatgaagacccatccctagcagtccatgaatttgcaaaggagattgatccctcaagaattcgtattgagagagtcattggggcaggtgaatttggagaagtctgtagtgggcgtttgaagacaccagggaaaagagagatcccagttgccattaaaactttgaaaggtggccacatggatcggcaaagaagagattttctaagagaagctagtatcatgggccagtttgaccatccaaacatcattcgcctagaaggggttgtcaccaaaagatccttcccggccattggggtggaggcgttttgccccagcttcctgagggcagggtttttaaatagcatccaggccccgcatccagtgccagggggaggatctttgccccccaggattcctgctggcagaccagtaatgattgtggtggaatatatggagaatggatccctagactcctttttgcggaagcatgatggccacttcacagtcatccagttggtcggaatgctccgaggcattgcatcaggcatgaagtatctttctgatatgggttatgttcatcgagacctagcggctcggaatatactggtcaatagcaacttagtatgcaaagtttctgattttggtctctccagagtgctggaagatgatccagaagctgcttatacaacaactgacctcttccaaactctaacacttaacctctgctattctgcataaattctgagaaaagccaaattttctgtcggtctaagaagacatagcctacacccaactggagataattataaaaaataatgaagcagcatgaggggaaggtatttaatgtgtattttaaagttgggagagattctccttcacctaatttaggtgtttgtgaattggcttgactttttgaagttaatttttaagccttgaacatgtccaactttaagaactttaagaataaatattttaacacaagtgaaaaaaaaaaaaaaaaaaaaaaaagg

SEQ ID NO: 218 - protein, 1035 aa, Homo sapiens
  REGION 1..1035: note = EphA6
MGGCEVREFLLQFGFFLPLLTAWPGDCSHVSNQVVLLDTTTVLGELGWKTYPLNGWDAITEMDEHNRPIHTYQVCNVMEPNQNNWLRTNWISRDAAQKIYVEMKFTLRDCNSIPWVLGTCKETFNLFYMESDESHGIKFKPNQYTKIDTIAADESFTQMDLGDRILKLNTEIREVGPIERKGFYLAFQDIGACIALVSVRVFYKKCPFTVRNLAMFPDTIPRVDSSSLVEVRGSCVKSAEERDTPKLYCGADGDWLVPLGRCICSTGYEEIEGSCHACRPGFYKAFAGNTKCSKCPPHSLTYMEATSVCQCEKGYFRAEKDPPSMACTGPPSAPRNVVFNINETALILEWSPPSDTGGRKDLTYSVICKKCGLDTSQCEDCGGGLRFIPRHTGLINNSVIVLDFVSHVNYTFEIEAMNGVSELSFSPKPFTAITVTTDHDAPSLIGMMRKDWASQNSIALSWQAPAFSNGAILDYEIKYYEKEHEQLTYSSTRSKAPSVIITGLKPATKYVFHIRVRTATGYSGYSQKFEFETGDEASDMAAEQGQILVIATAAVGGFTLLVILTLFFLITGRCQWYIKAKMKSEEKRRNHLQNGHCKFPGIKTYIDPDTYEDPSLAVHEFAKEIDPSRIRIERVIGAGEFGEVCSGRLKTPGKREIPVAIKTLKGGHMDRQRRDFLREASIMGQFDHPNIIRLEGVVTKSSFPAIGVEAFCPSFLRAGFLNSIQAPHPVPGGGSLPPRIPAGRPVMIVVEYMENGSLDSFLRKHDGHFTVIQLVGMLRGIASGMKYLSDMGYVHRDLAARNILVNSNLVCKVSDFGLSRVLEDDPEAAYTTTGGKIPIRWTAPEAIAYRKFSSASDAWSYGIVMWEVMSYGERPYWEMSNQDVILSIEEGYRLPAPMGCPASLHQLMLHCWQKERNHRPKFTDIVSFLDKLIRNPSALHTLVEDILVMPESPGEVPEYPLFVTVGDWLDSIKMGQYKNNFVAAGFTTFDLISRMSIEDIRRIGVILIGHQRRIVSSIQTLRLHMMHIQEKGFHV

SEQ ID NO: 219 - DNA, 5229 bp, Homo sapiens
  misc_feature 1..5229: note = EphA7
  source 1..5229: mol_type = genomic DNA
gcagtcggagacttgcaggcagcaaacacggtgcgagcgaacaggagtgggggggaaattaaaaaaagctaaacgtggagcagccgatcggggaccgagaaggggaatcgatgcaaggagcacaataaaacaaaagctacttcggaacaaacagcatttaaaaatccacgactcaagataactgaaacctaaaataaaacctgctcatgcaccatggtttttcaaactcggtacccttcatggattattttatgctacatctggctgctccgctttgcacacacaggggaggcgcaggctgcgaaggaagtactactgctggattctaaagcacaacaaacagagttggagtggatttcctctccacccaatgggtgggaagaaattagtggtttggatgagaactataccccgatacgaacataccaggtgtgccaagtcatggagcccaaccaaaacaactggctgcggactaactggatttccaaaggcaatgcacaaaggatttttgtagaattgaaattcaccctgagggattgtaacagtcttcctggagtactgggaacttgcaaggaaacatttaatttgtactattatgaaacagactatgacactggcaggaatataagagaaaacctctatgtaaaaatagacaccattgctgcagatgaaagttttacccaaggtgaccttggtgaaagaaagatgaagcttaacactgaggtgagagagattggacctttgtccaaaaagggattctatcttgcctttcaggatgtaggggcttgcatagctttggtttctgtcaaagtgtactacaagaagtgctggtccattattgagaacttagctatctttccagatacagtgactggttcagaattttcctctttagtcgaggttcgagggacatgtgtcagcagtgcagaggaagaagcggaaaacgcccccaggatgcactgcagtgcagaaggagaatggttagtgcccattggaaaatgtatctgcaaagcaggctaccagcaaaaaggagacacttgtgaaccctgtggccgtgggttctacaagtcttcctctcaagatcttcagtgctctcgttgtccaactcacagtttttctgataaagaaggctcctccagatgtgaatgtgaagatgggtattacagggctccatctgacccaccatacgttgcatgcacaaggcctccatctgcaccacagaacctcattttcaacatcaaccaaaccacagtaagtttggaatggagtcctcctgcagacaatgggggaagaaacgatgtgacctacagaatattgtgtaagcggtgcagttgggagcagggcgaatgtgttccctgtgggagtaacattggatacatgccccagcagactggattagaggataactatgtcactgtcatggacctgctagcccacgctaattatacttttgaagttgaagctgtaaatggagtttctgacttaagccgatcccagaggctctttgctgctgtcagtatcaccactggtcaagcagctccctcgcaagtgagcggagtaatgaaggagagagtactgcagcggagtgtcgagctttcctggcaggaaccagagcatcccaatggagtcatcacagaatatgaaatcaagtattacgagaaagatcaaagggaacggacctactcaacagtaaaaaccaagtctacttcagcctccattaataatctgaaaccaggaacagtgtatgttttccagattcgggcttttactgctgctggttatggaaattacagtcccagacttgatgttgctacactagaggaagctacaggtaaaatgtttgaagctacagctgtctccagtgaacagaatcctgttattatcattgctgtggttgctgtagctgggaccatcattttggtgttcatggtctttggcttcatcattgggagaaggcactgtggttatagcaaagctgaccaagaaggcgatgaagagctttactttcattttaaatttccaggcaccaaaacctacattgaccctgaaacctatgaggacccaaatagagctgtccatcaattcgccaaggagctagatgcctcctgtattaaaattgagcgtgtgattggtgcaggagaattcggtgaagtctgcagtggccgtttgaaacttccagggaaaagagatgttgcagtagccataaaaaccctgaaagttggttacacagaaaaacaaaggagagactttttgtgtgaagcaagcatcatggggcagtttgaccacccaaatgttgtccatttggaaggggttgttacaagagggaaaccagtcatgatagtaatagagttcatggaaaatggagccctagatgcatttctcaggaaacatgatgggcaatttacagtcattcagttagtaggaatgctgagaggaattgctgctggaatgagatatttggctgatatgggatatgttcacagggaccttgcagctcgcaatattcttgtcaacagcaatctcgtttgtaaagtgtcagattttggcctgtcccgagttatagaggatgatccagaagctgtctatacaactactggtggaaaaattccagtaaggtggacagcacccgaagccatccagtaccggaaattcacatcagccagtgatgtatggagctatggaatagtcatgtgggaagttatgtcttatggagaaagaccttattgggacatgtcaaatcaagatgttataaaagcaatagaagaaggttatcgtttaccagcacccatggactgcccagctggccttcaccagctaatgttggattgttggcaaaaggagcgtgctgaaaggccaaaatttgaacagatagttggaattctagacaaaatgattcgaaacccaaatagtctgaaaactcccctgggaacttgtagtaggccaataagccctcttctggatcaaaacactcctgatttcactaccttttgttcagttggagaatggctacaagctattaagatggaaagatataaagataatttcacggcagctggctacaattcccttgaatcagtagccaggatgactattgaggatgtgatgagtttagggatcacactggttggtcatcaaaagaaaatcatgagcagcattcagactatgagagcacaaatgctacatttacatggaactggcattcaagtgtgatatgcatttctcccttttaagggagattacagactgcaagagaacagtactggccttcagtatatgcatagaatgctgctagaagacaagtgatgtcctgggtccttccaacagtgaagagaagatttaagaagcacctatagacttgaactcctaagtgccaccagaatatataaaaagggaatttaggatccaccatcggtggccaggaaaatagcagtgacaataaacaaagtactacctgaaaaacatccaaacaccttgagctctctaacctcctttttgtcttatagactttttaaaatgtacataaagaatttaagaaagaatatatttgtcaaataaaatcatgatcttattgttaaaattaatgaaatattttccttaaatatgtgatttcagactattcctttttaaaatcatttgtgtttattcttcataaggactttgttttagaaagctgtttatagctttggacctttttagtgttaaatctgtaacattactacactgggtacctttgaaagaatctcaaatttcaaaagaaatagcatgattgaagatacatctctgttagaacattggtatcctttttgtgccattttattctgtttaatcagtgctgttttgatattgtttgctaattggcaggtagtcaagaaaatgcaagttgccaagagctctgatattttttaaaaagaatttttttgtaaagatcagacaacacactatcttttcaatgaaaaaagcaataatgatccatacatactataaggcacttttaacagattgtttatagagtgattttactagaaagaatttaataaactcgaagtttaggtttatgagtatataaacaaatgaggcacttcatctgaagaatgttggtgaaggcaagtctctgaaagcagaactatccagtgttatctaaaaattaatctgagcacatcaagattttttcattctcgtgacattaggaaatttaggataaatagttgacatatattttatatcctcttctgttgaatgcagtccaaacatgaaaggaaataattgttttatattataactctgaagcatgataaaggggcagttcacaattttcaccatttaaacacaaatttgctgcacagaatatcaccattgcagttcaaaacaaaacaaaacaaaaagtcttttgtttgtgaacactgatgcaagaaacttgttaaatgaaaggactctttaccctagaaggaagaggtgaaggatctggcttgtttttaaagctttatttattaaaccatattatttgattactgtgttagaatttcataagcaataattaaatgtgtctttatagatattgcaggaatgtatacatattgtgattaatgctttcaaaacttatgaaaatcatgaactaccccagaattgaactgttgtacttccaaagagaattgggctgtttataatgattttaatagagaaagatcccagggatcggtcataattggtcttgtttgataatgtgggcatccacaaacaaacaaacaaataacagaaacaaaatctgtaaatgttcctttgtaaaacttgtaaattttatttatactgtcttgttttgtacacacatttctctgtagtgggctctgaatacattgaaaatgcactatatttttctattttacttgcagagcatcacaaaagaacaggtattttcagtgctacataatgtgttttcccacatttaggaccaaagacggctatagaaaaactcaaatggattgcttcccaaacccctccccaccctttttttttggttttaaatcactgtacagtgttatttgatattttaatttattttttgattgactagaaaaatcattttaatttcactaaaatgttttttgtccctaaggaaaagtaatctgtaaaaataattttaattagcataatacagtcacctagacacttccatttgtaatctttgtaatagactgtaaatatatttttggaactataaaaaaaaaaaaaaaa

SEQ ID NO: 220 - protein, 998 aa, Homo sapiens
  REGION 1..998: note = EphA7
MVFQTRYPSWIILCYIWLLRFAHTGEAQAAKEVLLLDSKAQQTELEWISSPPNGWEEISGLDENYTPIRTYQVCQVMEPNQNNWLRTNWISKGNAQRIFVELKFTLRDCNSLPGVLGTCKETFNLYYYETDYDTGRNIRENLYVKIDTIAADESFTQGDLGERKMKLNTEVREIGPLSKKGFYLAFQDVGACIALVSVKVYYKKCWSIIENLAIFPDTVTGSEFSSLVEVRGTCVSSAEEEAENAPRMHCSAEGEWLVPIGKCICKAGYQQKGDTCEPCGRGFYKSSSQDLQCSRCPTHSFSDKEGSSRCECEDGYYRAPSDPPYVACTRPPSAPQNLIFNINQTTVSLEWSPPADNGGRNDVTYRILCKRCSWEQGECVPCGSNIGYMPQQTGLEDNYVTVMDLLAHANYTFEVEAVNGVSDLSRSQRLFAAVSITTGQAAPSQVSGVMKERVLQRSVELSWQEPEHPNGVITEYEIKYYEKDQRERTYSTVKTKSTSASINNLKPGTVYVFQIRAFTAAGYGNYSPRLDVATLEEATGKMFEATAVSSEQNPVIIIAVVAVAGTIILVFMVFGFIIGRRHCGYSKADQEGDEELYFHFKFPGTKTYIDPETYEDPNRAVHQFAKELDASCIKIERVIGAGEFGEVCSGRLKLPGKRDVAVAIKTLKVGYTEKQRRDFLCEASIMGQFDHPNVVHLEGVVTRGKPVMIVIEFMENGALDAFLRKHDGQFTVIQLVGMLRGIAAGMRYLADMGYVHRDLAARNILVNSNLVCKVSDFGLSRVIEDDPEAVYTTTGGKIPVRWTAPEAIQYRKFTSASDVWSYGIVMWEVMSYGERPYWDMSNQDVIKAIEEGYRLPAPMDCPAGLHQLMLDCWQKERAERPKFEQIVGILDKMIRNPNSLKTPLGTCSRPISPLLDQNTPDFTTFCSVGEWLQAIKMERYKDNFTAAGYNSLESVARMTIEDVMSLGITLVGHQKKIMSSIQTMRAQMLHLHGTGIQV

SEQ ID NO: 221 - DNA, 4996 bp, Homo sapiens
  misc_feature 1..4996: note = EphA8
  source 1..4996: mol_type = genomic DNA
gcgccggggtgtgcgcccggccgggtgtgcggagagcgagggagcgcgctccctcccgacgcgcgggccgcagcggccaagcccgagggtgcgtggcgcccccgcccgcccggcccggcccggccatggcccccgcccggggccgcctgccccctgcgctctgggtcgtcacggccgcggcggcggcggccacctgcgtgtccgcggcgcgcggcgaagtgaatttgctggacacgtcgaccatccacggggactggggctggctcacgtatccggctcatgggtgggactccatcaacgaggtggacgagtccttccagcccatccacacgtaccaggtttgcaacgtcatgagccccaaccagaacaactggctgcgcacgagctgggtcccccgagacggcgcccggcgcgtctatgctgagatcaagtttaccctgcgcgactgcaacagcatgcctggtgtgctgggcacctgcaaggagaccttcaacctctactacctggagtcggaccgcgacctgggggccagcacacaagaaagccagttcctcaaaatcgacaccattgcggccgacgagagcttcacaggtgccgaccttggtgtgcggcgtctcaagctcaacacggaggtgcgcagtgtgggtcccctcagcaagcgcggcttctacctggccttccaggacataggtgcctgcctggccatcctctctctccgcatctactataagaagtgccctgccatggtgcgcaatctggctgccttctcggaggcagtgacgggggccgactcgtcctcactggtggaggtgaggggccagtgcgtgcggcactcagaggagcgggacacacccaagatgtactgcagcgcggagggcgagtggctcgtgcccatcggcaaatgcgtgtgcagtgccggctacgaggagcggcgggatgcctgtgtggcctgtgagctgggcttctacaagtcagcccctggggaccagctgtgtgcccgctgccctccccacagccactccgcagctccagccgcccaagcctgccactgtgacctcagctactaccgtgcagccctggacccgccgtcctcagcctgcacccggccaccctcggcaccagtgaacctgatctccagtgtgaatgggacatcagtgactctggagtgggcccctcccctggacccaggtggccgcagtgacatcacctacaatgccgtgtgccgccgctgcccctgggcactgagccgctgcgaggcatgtgggagcggcacccgctttgtgccccagcagacaagcctggtgcaggccagcctgctggtggccaacctgctggcccacatgaactactccttctggatcgaggccgtcaatggcgtgtccgacctgagccccgagccccgccgggccgctgtggtcaacatcaccacgaaccaggcagccccgtcccaggtggtggtgatccgtcaagagcgggcggggcagaccagcgtctcgctgctgtggcaggagcccgagcagccgaacggcatcatcctggagtatgagatcaagtactacgagaaggacaaggagatgcagagctactccaccctcaaggccgtcaccaccagagccaccgtctccggcctcaagccgggcacccgctacgtgttccaggtccgagcccgcacctcagcaggctgtggccgcttcagccaggccatggaggtggagaccgggaaaccccggccccgctatgacaccaggaccattgtctggatctgcctgacgctcatcacgggcctggtggtgcttctgctcctgctcatctgcaagaagaggcactgtggctacagcaaggccttccaggactcggacgaggagaagatgcactatcagaatggacaggcacccccacctgtcttcctgcctctgcatcaccccccgggaaagctcccagagccccagttctatgcggaaccccacacctacgaggagccaggccgggcgggccgcagtttcactcgggagatcgaggcctctaggatccacatcgagaaaatcatcggctctggagactccggggaagtctgctacgggaggctgcgggtgccagggcagcgggatgtgcccgtggccatcaaggccctcaaagccggctacacggagagacagaggcgggacttcctgagcgaggcgtccatcatggggcaattcgaccatcccaacatcatccgcctcgagggtgtcgtcacccgtggccgcctggcaatgattgtgactgagtacatggagaacggctctctggacaccttcctgaggacccacgacgggcagttcaccatcatgcagctggtgggcatgctgagaggagtgggtgccggcatgcgctacctctcagacctgggctatgtccaccgagacctggccgcccgcaacgtcctggttgacagcaacctggtctgcaaggtgtctgacttcgggctctcacgggtgctggaggacgacccggatgctgcctacaccaccacgggcgggaagatccccatccgctggacggccccagaggccatcgccttccgcaccttctcctcggccagcgacgtgtggagcttcggcgtggtcatgtgggaggtgctggcctatggggagcggccctactggaacatgaccaaccgggatgtcatcagctctgtggaggaggggtaccgcctgcccgcacccatgggctgcccccacgccctgcaccagctcatgctcgactgttggcacaaggaccgggcgcagcggcctcgcttctcccagattgtcagtgtcctcgatgcgctcatccgcagccctgagagtctcagggccaccgccacagtcagcaggtgcccaccccctgccttcgtccggagctgctttgacctccgagggggcagcggtggcggtgggggcctcaccgtgggggactggctggactccatccgcatgggccggtaccgagaccacttcgctgcgggcggatactcctctctgggcatggtgctacgcatgaacgcccaggacgtgcgcgccctgggcatcaccctcatgggccaccagaagaagatcctgggcagcattcagaccatgcgggcccagctgaccagcacccaggggccccgccggcacctctgatgtacagccagcagggcccaggcagccaccaagcccaccccaggtcatgccagcggcagaggacgtgaggggctggcagcaggcagggcggccccaggcctctgccctcctctcaggtgctggaggagctgaaggcttcgccacaggacctggagttatcaggggtcaggcgcctgggaaggggcctttggtggccaccctggtgaggacacctgtcccccagggcaggcaccttctcttttccagagcctggggcctccacgtcacagagtccaacagggacatcactcgcctgcctctgtgtgcgtgcatgtgtgtgtgtggtggggggtgttctcacaaggtcatgggatctcatgtgaacagtgtgtgatcaagtgtgtccaccccttcgggtctcagcatggacgtgtgcatgttatgagcgtgtgcttatccgttaaggctggaggcacatgtgggtgatggtggatgatgtgtcatgaatgaggaggtgtgtgagcagggaactcagtgtgacaccgccaggtccagcacccatgggggcgggggagaggctcacccctacgtccccccacacctggaggctggagccaggggccacttctgaactgcaccagcaccaggcccaccctcgtctctgcctgggtgagcccaccccggctgtatctcaggtctgggtcctccctctagccgaggaggccacctgcagcctccacccggctctcaccgctgcttcaacaggaaaacagggttcccggtcagtccggctggccgccttcatggaggcatcatggcagagcacatgagatgtcctcagctgggcttggctgcctggccagggccgggggctcagcagcctcctctagcctctgatgccttccctccacggcccaggtctcctcactcaaagtcccttcgccaacctttcaatgcccagccctgacacctgccctttgtcccccaggcctaggatcagggaccagaggatcctatcttctcagcacccagcccaccccttcctgtagcatatggggagactaaggcctggagagaggggtgatgccccgtcccaggttgcactgcaaccaagtgtcagagtcggggctccggcctcctgccaaggctcttgtccccatacaccatcccacaagggcgctgggggtggaagtgccctggaagcccctcccctctcacactgacctccccccttacggcccaccagggtatgtaaatatctcttttctaccatgtcagaatattttttcctcactcctgacaatgcaaaaatggtcttcaaagcacataaaaagcacccagggtgagaaagccccatcccgggggccgttggcaggcagggaagcaggaaccccaccgtgtgccccctgccagccccagagggagtggcgagcccagctgcccagccctgccccccctccccatagccagcacagctatcccgcggggacaccagcactgagccccctctccctcctgcaataattcggggagtctcagccccatccaggtgccgcggccagctctctacacctctatatattatattactatatagccgagctgttcttccttcctatggaagtcggaaacatggtcagaacacgatctgggggggggatcctgtcttcctccccaccccaccccactcttacccaatttctgggctctggatcctcacagtcatggaggcaccgtgggcctggcacttgcaaaagtgtggcccctcactctagtgtgtggtccctctcagggtcctggggatctgcctctctgtggtctccatcctgactcttgaacttacccacaataagaataaattctgcctcatcttt

SEQ ID NO: 222 - protein, 1005 aa, Homo sapiens
  REGION 1..1005: note = EphA8
MAPARGRLPPALWVVTAAAAAATCVSAARGEVNLLDTSTIHGDWGWLTYPAHGWDSINEVDESFQPIHTYQVCNVMSPNQNNWLRTSWVPRDGARRVYAEIKFTLRDCNSMPGVLGTCKETFNLYYLESDRDLGASTQESQFLKIDTIAADESFTGADLGVRRLKLNTEVRSVGPLSKRGFYLAFQDIGACLAILSLRIYYKKCPAMVRNLAAFSEAVTGADSSSLVEVRGQCVRHSEERDTPKMYCSAEGEWLVPIGKCVCSAGYEERRDACVACELGFYKSAPGDQLCARCPPHSHSAAPAAQACHCDLSYYRAALDPPSSACTRPPSAPVNLISSVNGTSVTLEWAPPLDPGGRSDITYNAVCRRCPWALSRCEACGSGTRFVPQQTSLVQASLLVANLLAHMNYSFWIEAVNGVSDLSPEPRRAAVVNITTNQAAPSQVVVIRQERAGQTSVSLLWQEPEQPNGIILEYEIKYYEKDKEMQSYSTLKAVTTRATVSGLKPGTRYVFQVRARTSAGCGRFSQAMEVETGKPRPRYDTRTIVWICLTLITGLVVLLLLLICKKRHCGYSKAFQDSDEEKMHYQNGQAPPPVFLPLHHPPGKLPEPQFYAEPHTYEEPGRAGRSFTREIEASRIHIEKIIGSGDSGEVCYGRLRVPGQRDVPVAIKALKAGYTERQRRDFLSEASIMGQFDHPNIIRLEGVVTRGRLAMIVTEYMENGSLDTFLRTHDGQFTIMQLVGMLRGVGAGMRYLSDLGYVHRDLAARNVLVDSNLVCKVSDFGLSRVLEDDPDAAYTTTGGKIPIRWTAPEAIAFRTFSSASDVWSFGVVMWEVLAYGERPYWNMTNRDVISSVEEGYRLPAPMGCPHALHQLMLDCWHKDRAQRPRFSQIVSVLDALIRSPESLRATATVSRCPPPAFVRSCFDLRGGSGGGGGLTVGDWLDSIRMGRYRDHFAAGGYSSLGMVLRMNAQDVRALGITLMGHQKKILGSIQTMRAQLTSTQGPRRHL

SEQ ID NO: 223 - DNA, 4536 bp, Homo sapiens
  misc_feature 1..4536: note = EphB1
  source 1..4536: mol_type = genomic DNA
gaattccacatgcacacccacacccacgcgcgcccgcaccgccccacgcgcacacactcctgcccacgcccacgcagcgctccgggaagtccggtccgggcgagagcgcgaaaggataccgagaagccacccgcggagagcgcagcggcgccctgggacgcggcgctctcccggcgctgctgcctcggcttggtctcggcctgcgggccgtcggccggcgatggccctggattatctactactgctcctcctggcatccgcagtggctgcgatggaagaaacgttaatggacaccagaacggctactgcagagctgggctggacggccaatcctgcgtccgggtgggaagaagtcagtggctacgatgaaaacctgaacaccatccgcacctaccaggtgtgcaatgtcttcgagcccaaccagaacaattggctgctcaccaccttcatcaaccggcggggggcccatcgcatctacacagagatgcgcttcactgtgagagactgcagcagcctccctaatgtcccaggatcctgcaaggagaccttcaacttgtattactatgagactgactctgtcattgccaccaagaagtcagccttctggtctgaggccccctacctcaaagtagacaccattgctgcagatgagagcttctcccaggtggactttgggggaaggctgatgaaggtaaacacagaagtcaggagctttgggcctcttactcggaatggtttttacctcgcttttcaggattatggagcctgtatgtctcttctttctgtccgtgtcttcttcaaaaagtgtcccagcattgtgcaaaattttgcagtgtttccagagactatgacaggggcagagagcacatctctggtgattgctcggggcacatgcatccccaacgcagaggaagtggacgtgcccatcaaactctactgcaacggggatggggaatggatggtgcctattgggcgatgcacctgcaagcctggctatgagcctgagaacagcgtggcatgcaaggcttgccctgcagggacattcaaggccagccaggaagctgaaggctgctcccactgcccctccaacagccgctcccctgcagaggcgtctcccatctgcacctgtcggaccggttattaccgagcggactttgaccctccagaagtggcatgcactagcgtcccatcaggtccccgcaatgttatctccatcgtcaatgagacgtccatcattctggagtggcaccctccaagggagacaggtgggcgggatgatgtgacctacaacatcatctgcaaaaagtgccgggcagaccgccggagctgctcccgctgtgacgacaatgtggagtttgtgcccaggcagctgggcctgacggagtgccgcgtctccatcagcagcctgtgggcccacaccccctacacctttgacatccaggccatcaatggagtctccagcaagagtcccttccccccacagcacgtctctgtcaacatcaccacaaaccaagccgccccctccaccgttcccatcatgcaccaagtcagtgccactatgaggagcatcaccttgtcatggccacagccggagcagcccaatggcatcatcctggactatgagatccggtactatgagaaggaacacaatgagttcaactcctccatggccaggagtcagaccaacacagcaaggattgatgggctgcggcctggcatggtatatgtggtacaggtgcgtgcccgcactgttgctggctacggcaagttcagtggcaagatgtgcttccagactctgactgacgatgattacaagtcagagctgagggagcagctgcccctgattgctggctcggcagcggccggggtcgtgttcgttgtgtccttggtggccatctctatcgtctgtagcaggaaacgggcttatagcaaagaggctgtgtacagcgataagctccagcattacagcacaggccgaggctccccagggatgaagatctacattgaccccttcacttacgaggatcccaacgaagctgtccgggagtttgccaaggagattgatgtatcttttgtgaaaattgaagaggtcatcggagcaggggagtttggagaagtgtacaaggggcgtttgaaactgccaggcaagagggaaatctacgtggccatcaagaccctgaaggcagggtactcggagaagcagcgtcgggactttctgagtgaggcgagcatcatgggccagttcgaccatcctaacatcattcgcctggagggtgtggtcaccaagagtcggcctgtcatgatcatcacagagttcatggagaatggtgcattggattctttcctcaggcaaaatgacgggcagttcaccgtgatccagcttgtgggtatgctcaggggcatcgctgctggcatgaagtacctggctgagatgaattatgtgcatcgggacctggctgctaggaacattctggtcaacagtaacctggtgtgcaaggtgtccgactttggcctctcccgctacctccaggatgacacctcagatcccacctacaccagctccttgggagggaagatccctgtgagatggacagctccagaggccatcgcctaccgcaagttcacttcagccagcgacgtttggagctatgggatcgtcatgtgggaagtcatgtcatttggagagagaccctattgggatatgtccaaccaagatgtcatcaatgccatcgagcaggactaccggctgcccccacccatggactgtccagctgctctacaccagctcatgctggactgttggcagaaggaccggaacagccggccccggtttgcggagattgtcaacaccctagataagatgatccggaacccggcaagtctcaagactgtggcaaccatcaccgccgtgccttcccagcccctgctcgaccgctccatcccagacttcacggcctttaccaccgtggatgactggctcagcgccatcaaaatggtccagtacagggacagcttcctcactgctggcttcacctccctccagctggtcacccagatgacatcagaagacctcctgagaataggcatcaccttggcaggccatcagaagaagatcctgaacagcattcattctatgagggtccagataagtcagtcaccaacggcaatggcatgagaactcttgtttcttggggaaggagaggagggaaaaggaccagggtcaagggggaccagaggttgaccactgtggaatgtactggagagactggcttctcagctgaggaatgcatttccatcagtgaagaatcaaccggacctgttgctagcaggcaatctccatttctcagtgacagaagcatgtttgagatgccgtgggaaaccaaatatataataataaaaatataaaaaggtgatgttcaacagaagtgaagacaaaacaatatgcatcaggagaacaagagtaaacccagctcccactctcagtgggctgcagttgcccaaccacaggaagaaagggaaggaggtagagggaagaaacagaagcagtgttccattttcttcctcaccaatgacattcttttcttttctcctttcgtactcctccctgagagtcccctcccttctcccacactcgtttccctttgctcatgactcctgtagggaagtttcttcaaacaaaacccagctcctgagtctccagatgttgttctgtcagttgccaaaggactttgctgaccactgcatggggatccaaccaattcaattaatgtcttcatattgaagaagagatgtaccttcaattgaaaacctcgtttttcttttgtttgcattttctgcaaaaaggaaaaagaaaccacaaattggggaaaaaaaaagaagaaaaacctgtttccgtgtgcaaaagcacacatatgtatgtctgtgttataaaatgactgtgcttgttcgtaacagatgcaaacaagaaagaagaactgggaagtctttgtccctaggaaatccaaaggggctggaatatggtgttggtttggctttctggttggcccaatcggcctattggctcaatgggaagagaggagagggagaaaaataaaatgaaaggaaaaaaaaaagtttgcaaattcagacaggaaacaggtgagtggtttgaattggatgcagtgtgggccatcctggaatgatactgactgattaattattcctgataacatctcaagaaaaggagaaggaaagtgtttctggagaatgttctttcacatcactggaatctgcaattcaagaagtgacaagggagaattcttgctttacctatggactggcttaagccgtgtggcatccgaggaatgtttcaaatgtgtctgtgtttctctttacattccttgttgtacctcattgttcaattcacttttgtaaattccacctaacatttaattattttaaatttctccttttaccttaatctccttgctaattttatctgtctaattaaaaagagcagaagcatgtctgggtttacgtaaaaaaaaaaaaaaaaaa

SEQ ID NO: 224 - protein, 984 aa, Homo sapiens
  REGION 1..984: note = EphB1
MALDYLLLLLLASAVAAMEETLMDTRTATAELGWTANPASGWEEVSGYDENLNTIRTYQVCNVFEPNQNNWLLTTFINRRGAHRIYTEMRFTVRDCSSLPNVPGSCKETFNLYYYETDSVIATKKSAFWSEAPYLKVDTIAADESFSQVDFGGRLMKVNTEVRSFGPLTRNGFYLAFQDYGACMSLLSVRVFFKKCPSIVQNFAVFPETMTGAESTSLVIARGTCIPNAEEVDVPIKLYCNGDGEWMVPIGRCTCKPGYEPENSVACKACPAGTFKASQEAEGCSHCPSNSRSPAEASPICTCRTGYYRADFDPPEVACTSVPSGPRNVISIVNETSIILEWHPPRETGGRDDVTYNIICKKCRADRRSCSRCDDNVEFVPRQLGLTECRVSISSLWAHTPYTFDIQAINGVSSKSPFPPQHVSVNITTNQAAPSTVPIMHQVSATMRSITLSWPQPEQPNGIILDYEIRYYEKEHNEFNSSMARSQTNTARIDGLRPGMVYVVQVRARTVAGYGKFSGKMCFQTLTDDDYKSELREQLPLIAGSAAAGVVFVVSLVAISIVCSRKRAYSKEAVYSDKLQHYSTGRGSPGMKIYIDPFTYEDPNEAVREFAKEIDVSFVKIEEVIGAGEFGEVYKGRLKLPGKREIYVAIKTLKAGYSEKQRRDFLSEASIMGQFDHPNIIRLEGVVTKSRPVMIITEFMENGALDSFLRQNDGQFTVIQLVGMLRGIAAGMKYLAEMNYVHRDLAARNILVNSNLVCKVSDFGLSRYLQDDTSDPTYTSSLGGKIPVRWTAPEAIAYRKFTSASDVWSYGIVMWEVMSFGERPYWDMSNQDVINAIEQDYRLPPPMDCPAALHQLMLDCWQKDRNSRPRFAEIVNTLDKMIRNPASLKTVATITAVPSQPLLDRSIPDFTAFTTVDDWLSAIKMVQYRDSFLTAGFTSLQLVTQMTSEDLLRIGITLAGHQKKILNSIHSMRVQISQSPTAMA

SEQ ID NO: 225 - DNA, 3949 bp, Homo sapiens
  misc_feature 1..3949: note = EphB2
  source 1..3949: mol_type = genomic DNA
gaattccgccccgggaagcgcagccatggctctgcggaggctgggggccgcgctgctgctgctgccgctgctcgccgccgtggaagaaacgctaatggactccactacagcgactgctgagctgggctggatggtgcatcctccatcagggtgggaagaggtgagtggctacgatgagaacatgaacacgatccgcacgtaccaggtgtgcaacgtgtttgagtcaagccagaacaactggctacggaccaagtttatccggcgccgtggcgcccaccgcatccacgtggagatgaagttttcggtgcgtgactgcagcagcatccccagcgtgcctggctcctgcaaggagaccttcaacctctattactatgaggctgactttgactcggccaccaagaccttccccaactggatggagaatccatgggtgaaggtggataccattgcagccgacgagagcttctcccaggtggacctgggtggccgcgtcatgaaaatcaacaccgaggtgcggagcttcggacctgtgtcccgcagcggcttctacctggccttccaggactatggcggctgcatgtccctcatcgccgtgcgtgtcttctaccgcaagtgcccccgcatcatccagaatggcgccatcttccaggaaaccctgtcgggggctgagagcacatcgctggtggctgcccggggcagctgcatcgccaatgcggaagaggtggatgtacccatcaagctctactgtaacggggacggcgagtggctggtgcccatcgggcgctgcatgtgcaaagcaggcttcgaggccgttgagaatggcaccgtctgccgaggttgtccatctgggactttcaaggccaaccaaggggatgaggcctgtacccactgtcccatcaacagccggaccacttctgaaggggccaccaactgtgtctgccgcaatggctactacagagcagacctggaccccctggacatgccctgcacaaccatcccctccgcgccccaggctgtgatttccagtgtcaatgagacctccctcatgctggagtggacccctccccgcgactccggaggccgagaggacctcgtctacaacatcatctgcaagagctgtggctcgggccggggtgcctgcacccgctgcggggacaatgtacagtacgcaccacgccagctaggcctgaccgagccacgcatttacatcagtgacctgctggcccacacccagtacaccttcgagatccaggctgtgaacggcgttactgaccagagccccttctcgcctcagttcgcctctgtgaacatcaccaccaaccaggcagctccatcggcagtgtccatcatgcatcaggtgagccgcaccgtggacagcattaccctgtcgtggtcccagccagaccagcccaatggcgtgatcctggactatgagctgcagtactatgagaaggagctcagtgagtacaacgccacagccataaaaagccccaccaacacggtcaccgtgcagggcctcaaagccggcgccatctatgtcttccaggtgcgggcacgcaccgtggcaggctacgggcgctacagcggcaagatgtacttccagaccatgacagaagccgagtaccagacaagcatccaggagaagttgccactcatcatcggctcctcggccgctggcctggtcttcctcattgctgtggttgtcatcgccatcgtgtgtaacagacgggggtttgagcgtgctgactcggagtacacggacaagctgcaacactacaccagtggccacatgaccccaggcatgaagatctacatcgatcctttcacctacgaggaccccaacgaggcagtgcgggagtttgccaaggaaattgacatctcctgtgtcaaaattgagcaggtgatcggagcaggggagtttggcgaggtctgcagtggccacctgaagctgccaggcaagagagagatctttgtggccatcaagacgctcaagtcgggctacacggagaagcagcgccgggacttcctgagcgaagcctccatcatgggccagttcgaccatcccaacgtcatccacctggagggtgtcgtgaccaagagcacacctgtgatgatcatcaccgagttcatggagaatggctccctggactcctttctccggcaaaacgatgggcagttcacagtcatccagctggtgggcatgcttcggggcatcgcagctggcatgaagtacctggcagacatgaactatgttcaccgtgacctggctgcccgcaacatcctcgtcaacagcaacctggtctgcaaggtgtcggactttgggctctcacgctttctagaggacgatacctcagaccccacctacaccagtgccctgggcggaaagatccccatccgctggacagccccggaagccatccagtaccggaagttcacctcggccagtgatgtgtggagctacggcattgtcatgtgggaggtgatgtcctatggggagcggccctactgggacatgaccaaccaggatgtaatcaatgccattgagcaggactatcggctgccaccgcccatggactgcccgagcgccctgcaccaactcatgctggactgttggcagaaggaccgcaaccaccggcccaagttcggccaaattgtcaacacgctagacaagatgatccgcaatcccaacagcctcaaagccatggcgcccctctcctctggcatcaacctgccgctgctggaccgcacgatccccgactacaccagctttaacacggtggacgagtggctggaggccatcaagatggggcagtacaaggagagcttcgccaatgccggcttcacctcctttgacgtcgtgtctcagatgatgatggaggacattctccgggttggggtcactttggctggccaccagaaaaaaatcctgaacagtatccaggtgatgcgggcgcagatgaaccagattcagtctgtggagggccagccactcgccaggaggccacgggccacgggaagaaccaagcggtgccagccacgagacgtcaccaagaaaacatgcaactcaaacgacggaaaaaaaaagggaatgggaaaaaagaaaacagatcctgggagggggcgggaaatacaaggaatattttttaaagaggattctcataaggaaagcaatgactgttcttgcgggggataaaaaagggcttgggagattcatgcgatgtgtccaatcggagacaaaagcagtttctctccaactccctctgggaaggtgacctggccagagccaagaaacactttcagaaaaacaaatgtgaaggggagagacaggggccacccttggctcctgtccctgctgctcctctaggcctcactcaacaaccaagcgcctggaggacgggacagatggacagacagccaccctgagaacccctctgggaaaatctattcctgccaccactgggcaaacagaagaatttttctgtctttggagagtattttagaaactccaatgaaagacactgtttctcctgttggctcacagggctgaaaggggcttttgtcctcctgggtcagggagaacgcggggaccccagaaaggtcagccttcctgaggatgggcaacccccaggtctgcagctccaggtacatatcacgcgcacagcctggcagcctggccctcctggtgcccactcccgccagcccctgcctcgaggactgatactgcagtgactgccgtcagctccgactgccgctgagaagggttgatcctgcatctgggtttgtttacagcaattcctggactcgggggtattttggtcacagggtggttttggtttagggggtttgtttgttgggttgttttttgttttttggttttttttaatgacaatgaagtgacactttgacatttccaaaaaaaaaaaaaaaaaaaaaaaaaaaaaaaaaaaaa

SEQ ID NO: 226 - protein, 1055 aa, Homo sapiens
  REGION 1..1055: note = EphB2
MALRRLGAALLLLPLLAAVEETLMDSTTATAELGWMVHPPSGWEEVSGYDENMNTIRTYQVCNVFESSQNNWLRTKFIRRRGAHRIHVEMKFSVRDCSSIPSVPGSCKETFNLYYYEADFDSATKTFPNWMENPWVKVDTIAADESFSQVDLGGRVMKINTEVRSFGPVSRSGFYLAFQDYGGCMSLIAVRVFYRKCPRIIQNGAIFQETLSGAESTSLVAARGSCIANAEEVDVPIKLYCNGDGEWLVPIGRCMCKAGFEAVENGTVCRGCPSGTFKANQGDEACTHCPINSRTTSEGATNCVCRNGYYRADLDPLDMPCTTIPSAPQAVISSVNETSLMLEWTPPRDSGGREDLVYNIICKSCGSGRGACTRCGDNVQYAPRQLGLTEPRIYISDLLAHTQYTFEIQAVNGVTDQSPFSPQFASVNITTNQAAPSAVSIMHQVSRTVDSITLSWSQPDQPNGVILDYELQYYEKELSEYNATAIKSPTNTVTVQGLKAGAIYVFQVRARTVAGYGRYSGKMYFQTMTEAEYQTSIQEKLPLIIGSSAAGLVFLIAVVVIAIVCNRRGFERADSEYTDKLQHYTSGHMTPGMKIYIDPFTYEDPNEAVREFAKEIDISCVKIEQVIGAGEFGEVCSGHLKLPGKREIFVAIKTLKSGYTEKQRRDFLSEASIMGQFDHPNVIHLEGVVTKSTPVMIITEFMENGSLDSFLRQNDGQFTVIQLVGMLRGIAAGMKYLADMNYVHRDLAARNILVNSNLVCKVSDFGLSRFLEDDTSDPTYTSALGGKIPIRWTAPEAIQYRKFTSASDVWSYGIVMWEVMSYGERPYWDMTNQDVINAIEQDYRLPPPMDCPSALHQLMLDCWQKDRNHRPKFGQIVNTLDKMIRNPNSLKAMAPLSSGINLPLLDRTIPDYTSFNTVDEWLEAIKMGQYKESFANAGFTSFDVVSQMMMEDILRVGVTLAGHQKKILNSIQVMRAQMNQIQSVEGQPLARRPRATGRTKRCQPRDVTKKTCNSNDGKKKGMGKKKTDPGRGREIQGIFFKEDSHKESNDCSCGG

SEQ ID NO: 227 - DNA, 4234 bp, Homo sapiens
  misc_feature 1..4234: note = EphB3
  source 1..4234: mol_type = genomic DNA
cgtgagcggcgcagcaagatcccagctcggaccccggacggcgcgcgcccccgaagccccggatcccagtcgggcccgcagctgaccgccagattactgtgcatcccgaatcacgaccacctgcaccctcctgccccggcccgccccccaagtcctcaggcacccagctccccggcgccccggatcctcctggaccggtccgtccagattcccgcgggaccgacctgtccgcatccccaggaccgccgggctcggtgcaccgcctcggtcccggagccgcccgcctggattgcattccctcctctcctggatctcctgggacccgacgcgagcctgccccggagcccgccgagcgcaccctctctcgggtgcctgcagccccgccggcgcggcccggcccggcgcggcccggctcggctcctagagctgccacggccatggccagagcccgcccgccgccgccgccgtcgccgccgccggggcttctgccgctgctccctccgctgctgctgctgccgctgctgctgctgcccgccggctgccgggcgctggaagagaccctcatggacacaaaatgggtaacatctgagttggcgtggacatctcatccagaaagtgggtgggaagaggtgagtggctacgatgaggccatgaatcccatccgcacataccaggtgtgtaatgtgcgcgagtcaagccagaacaactggcttcgcacggggttcatctggcggcgggatgtgcagcgggtctacgtggagctcaagttcactgtgcgtgactgcaacagcatccccaacatccccggctcctgcaaggagaccttcaacctcttctactacgaggctgacagcgatgtggcctcagcctcctcccccttctggatggagaacccctacgtgaaagtggacaccattgcacccgatgagagcttctcgcggctggatgccggccgtgtcaacaccaaggtgcgcagctttgggccactttccaaggctggcttctacctggccttccaggaccagggcgcctgcatgtcgctcatctccgtgcgcgccttctacaagaagtgtgcatccaccaccgcaggcttcgcactcttccccgagaccctcactggggcggagcccacctcgctggtcattgctcctggcacctgcatccctaacgccgtggaggtgtcggtgccactcaagctctactgcaacggcgatggggagtggatggtgcctgtgggtgcctgcacctgtgccaccggccatgagccagctgccaaggagtcccagtgccgcccctgtccccctgggagctacaaggcgaagcagggagaggggccctgcctcccatgtccccccaacagccgtaccacctccccagccgccagcatctgcacctgccacaataacttctaccgtgcagactcggactctgcggacagtgcctgtaccaccgtgccatctccaccccgaggtgtgatctccaatgtgaatgaaacctcactgatcctcgagtggagtgagccccgggacctgggtggccgggatgacctcctgtacaatgtcatctgcaagaagtgccatggggctggaggggcctcagcctgctcacgctgtgatgacaacgtggagtttgtgcctcggcagctgggcctgacggagcgccgggtccacatcagccatctgctggcccacacgcgctacacctttgaggtgcaggcggtcaacggtgtctcgggcaagagccctctgccgcctcgttatgcggccgtgaatatcaccacaaaccaggctgccccgtctgaagtgcccacactacgcctgcacagcagctcaggcagcagcctcaccctatcctgggcacccccagagcggcccaacggagtcatcctggactacgagatgaagtactttgagaagagcgagggcatcgcctccacagtgaccagccagatgaactccgtgcagctggacgggcttcggcctgacgcccgctatgtggtccaggtccgtgcccgcacagtagctggctatgggcagtacagccgccctgccgagtttgagaccacaagtgagagaggctctggggcccagcagctccaggagcagcttcccctcatcgtgggctccgctacagctgggcttgtcttcgtggtggctgtcgtggtcatcgctatcgtctgcctcaggaagcagcgacacggctctgattcggagtacacggagaagctgcagcagtacattgctcctggaatgaaggtttatattgacccttttacctacgaggaccctaatgaggctgttcgggagtttgccaaggagatcgacgtgtcctgcgtcaagatcgaggaggtgatcggagctggggaatttggggaagtgtgccgtggtcgactgaaacagcctggccgccgagaggtgtttgtggccatcaagacgctgaaggtgggctacaccgagaggcagcggcgggacttcctaagcgaggcctccatcatgggtcagtttgatcaccccaatataatccggctcgagggcgtggtcaccaaaagtcggccagttatgatcctcactgagttcatggaaaactgcgccctggactccttcctccggctcaacgatgggcagttcacggtcatccagctggtgggcatgttgcggggcattgctgccggcatgaagtacctgtccgagatgaactatgtgcaccgcgacctggctgctcgcaacatccttgtcaacagcaacctggtctgcaaagtctcagactttggcctctcccgcttcctggaggatgacccctccgatcctacctacaccagttccctgggcgggaagatccccatccgctggactgccccagaggccatagcctatcggaagttcacttctgctagtgatgtctggagctacggaattgtcatgtgggaggtcatgagctatggagagcgaccctactgggacatgagcaaccaggatgtcatcaatgccgtggagcaggattaccggctgccaccacccatggactgtcccacagcactgcaccagctcatgctggactgctgggtgcgggaccggaacctcaggcccaaattctcccagattgtcaataccctggacaagctcatccgcaatgctgccagcctcaaggtcattgccagcgctcagtctggcatgtcacagcccctcctggaccgcacggtcccagattacacaaccttcacgacagttggtgattggctggatgccatcaagatggggcggtacaaggagagcttcgtcagtgcggggtttgcatcttttgacctggtggcccagatgacggcagaagacctgctccgtattggggtcaccctggccggccaccagaagaagatcctgagcagtatccaggacatgcggctgcagatgaaccagacgctgcctgtgcaggtctgacaccggctcccacggggaccctgaggaccgtgcagggatgccaagcagccggctggactttcggactcttggacttttggatgcctggccttaggctgtggcccagaagctggaagtttgggaaaggcccaagctgggacttctccaggcctgtgttccctccccaggaagtgcgccccaaacctcttcatattgaagatggattaggagagggggtgatgacccctccccaagcccctcagggcccagaccttcctgctctccagcaggggatccccacaacctcacacttgtctgttcttcagtgctggaggtcctggcagggtcaggctggggtaagccggggttccacagggcccagccctggcaggggtctggccccccaggtaggcggagagcagtccctccctcaggaactggaggaggggactccaggaatggggaaatgtgacaccaccatcctgaagccagcttgcacctccagtttgcacagggatttgttctgggggctgagggccctgtccccacccccgcccttggtgctgtcataaaagggcaggcaggggcaggctgaggagttgccctttgccccccagagactgactctcagagccagagatgggatgtgtgagtgtgtgtgtgtgtgtgtgtgtgtgcgcgcgcgcgcgcgtgtgtgtgtgcacgcactggcctgcacagagagcatgggtgagcgtgtaaaagcttggccctgtgccctacaatggggccagctgggccgacagcagaataaaggcaataagatgaaaaaaaaaaaaaaa

SEQ ID NO: 228 - protein, 998 aa, Homo sapiens
  REGION 1..998: note = EphB3
MARARPPPPPSPPPGLLPLLPPLLLLPLLLLPAGCRALEETLMDTKWVTSELAWTSHPESGWEEVSGYDEAMNPIRTYQVCNVRESSQNNWLRTGFIWRRDVQRVYVELKFTVRDCNSIPNIPGSCKETFNLFYYEADSDVASASSPFWMENPYVKVDTIAPDESFSRLDAGRVNTKVRSFGPLSKAGFYLAFQDQGACMSLISVRAFYKKCASTTAGFALFPETLTGAEPTSLVIAPGTCIPNAVEVSVPLKLYCNGDGEWMVPVGACTCATGHEPAAKESQCRPCPPGSYKAKQGEGPCLPCPPNSRTTSPAASICTCHNNFYRADSDSADSACTTVPSPPRGVISNVNETSLILEWSEPRDLGGRDDLLYNVICKKCHGAGGASACSRCDDNVEFVPRQLGLTERRVHISHLLAHTRYTFEVQAVNGVSGKSPLPPRYAAVNITTNQAAPSEVPTLRLHSSSGSSLTLSWAPPERPNGVILDYEMKYFEKSEGIASTVTSQMNSVQLDGLRPDARYVVQVRARTVAGYGQYSRPAEFETTSERGSGAQQLQEQLPLIVGSATAGLVFVVAVVVIAIVCLRKQRHGSDSEYTEKLQQYIAPGMKVYIDPFTYEDPNEAVREFAKEIDVSCVKIEEVIGAGEFGEVCRGRLKQPGRREVFVAIKTLKVGYTERQRRDFLSEASIMGQFDHPNIIRLEGVVTKSRPVMILTEFMENCALDSFLRLNDGQFTVIQLVGMLRGIAAGMKYLSEMNYVHRDLAARNILVNSNLVCKVSDFGLSRFLEDDPSDPTYTSSLGGKIPIRWTAPEAIAYRKFTSASDVWSYGIVMWEVMSYGERPYWDMSNQDVINAVEQDYRLPPPMDCPTALHQLMLDCWVRDRNLRPKFSQIVNTLDKLIRNAASLKVIASAQSGMSQPLLDRTVPDYTTFTTVGDWLDAIKMGRYKESFVSAGFASFDLVAQMTAEDLLRIGVTLAGHQKKILSSIQDMRLQMNQTLPVQV

SEQ ID NO: 229 - DNA, 4369 bp, Homo sapiens
  misc_feature 1..4369: note = EphB4
  source 1..4369: mol_type = genomic DNA
ttccagcgcagctcagcccctgcccggcccggcccgcccggctccgcgccgcagtctccctccctcccgctccgtccccgctcgggctcccaccatccccgcccgcgaggagagcactcggcccggcggcgcgagcagagccactccagggagggggggagaccgcgagcggccggctcagcccccgccacccggggcgggaccccgaggccccggagggaccccaactccagccacgtcttgctgcgcgcccgcccggcgcggccactgccagcacgctccgggcccgccgcccgcgcgcgcggcacagacgcggggccacacttggcgccgccgcccggtgccccgcacgctcgcatgggcccgcgctgagggccccgacgaggagtcccgcgcggagtatcggcgtccacccgcccagggagagtcagacctgggggggcgagggccccccaaactcagttcggatcctacccgagtgaggcggcgccatggagctccgggtgctgctctgctgggcttcgttggccgcagctttggaagagaccctgctgaacacaaaattggaaactgctgatctgaagtgggtgacattccctcaggtggacgggcagtgggaggaactgagcggcctggatgaggaacagcacagcgtgcgcacctacgaagtgtgtgacgtgcagcgtgccccgggccaggcccactggcttcgcacaggttgggtcccacggcggggcgccgtccacgtgtacgccacgctgcgcttcaccatgctcgagtgcctgtccctgcctcgggctgggcgctcctgcaaggagaccttcaccgtcttctactatgagagcgatgcggacacggccacggccctcacgccagcctggatggagaacccctacatcaaggtggacacggtggccgcggagcatctcacccggaagcgccctggggccgaggccaccgggaaggtgaatgtcaagacgctgcgtctgggaccgctcagcaaggctggcttctacctggccttccaggaccagggtgcctgcatggccctgctatccctgcacctcttctacaaaaagtgcgcccagctgactgtgaacctgactcgattcccggagactgtgcctcgggagctggttgtgcccgtggccggtagctgcgtggtggatgccgtccccgcccctggccccagccccagcctctactgccgtgaggatggccagtgggccgaacagccggtcacgggctgcagctgtgctccggggttcgaggcagctgaggggaacaccaagtgccgagcctgtgcccagggcaccttcaagcccctgtcaggagaagggtcctgccagccatgcccagccaatagccactctaacaccattggatcagccgtctgccagtgccgcgtcgggtacttccgggcacgcacagacccccggggtgcaccctgcaccacccctccttcggctccgcggagcgtggtttcccgcctgaacggctcctccctgcacctggaatggagtgcccccctggagtctggtggccgagaggacctcacctacgccctccgctgccgggagtgccgacccggaggctcctgtgcgccctgcgggggagacctgacttttgaccccggcccccgggacctggtggagccctgggtggtggttcgagggctacgtcctgacttcacctatacctttgaggtcactgcattgaacggggtatcctccttagccacggggcccgtcccatttgagcctgtcaatgtcaccactgaccgagaggtacctcctgcagtgtctgacatccgggtgacgcggtcctcacccagcagcttgagcctggcctgggctgttccccgggcacccagtggggctgtgctggactacgaggtcaaataccatgagaagggcgccgagggtcccagcagcgtgcggttcctgaagacgtcagaaaaccgggcagagctgcgggggctgaagcggggagccagctacctggtgcaggtacgggcgcgctctgaggccggctacgggcccttcggccaggaacatcacagccagacccaactggatgagagcgagggctggcgggagcagctggccctgattgcgggcacggcagtcgtgggtgtggtcctggtcctggtggtcattgtggtcgcagttctctgcctcaggaagcagagcaatgggagagaagcagaatattcggacaaacacggacagtatctcatcggacatggtactaaggtctacatcgaccccttcacttatgaagaccctaatgaggctgtgagggaatttgcaaaagagatcgatgtctcctacgtcaagattgaagaggtgattggtgcaggtgagtttggcgaggtgtgccgggggcggctcaaggccccagggaagaaggagagctgtgtggcaatcaagaccctgaagggtggctacacggagcggcagcggcgtgagtttctgagcgaggcctccatcatgggccagttcgagcaccccaatatcatccgcctggagggcgtggtcaccaacagcatgcccgtcatgattctcacagagttcatggagaacggcgccctggactccttcctgcggctaaacgacggacagttcacagtcatccagctcgtgggcatgctgcggggcatcgcctcgggcatgcggtaccttgccgagatgagctacgtccaccgagacctggctgctcgcaacatcctagtcaacagcaacctcgtctgcaaagtgtctgactttggcctttcccgattcctggaggagaactcttccgatcccacctacacgagctccctgggaggaaagattcccatccgatggactgccccggaggccattgccttccggaagttcacttccgccagtgatgcctggagttacgggattgtgatgtgggaggtgatgtcatttggggagaggccgtactgggacatgagcaatcaggacgtgatcaatgccattgaacaggactaccggctgcccccgcccccagactgtcccacctccctccaccagctcatgctggactgttggcagaaagaccggaatgcccggccccgcttcccccaggtggtcagcgccctggacaagatgatccggaaccccgccagcctcaaaatcgtggcccgggagaatggcggggcctcacaccctctcctggaccagcggcagcctcactactcagcttttggctctgtgggcgagtggcttcgggccatcaaaatgggaagatacgaagaaagtttcgcagccgctggctttggctccttcgagctggtcagccagatctctgctgaggacctgctccgaatcggagtcactctggcgggacaccagaagaaaatcttggccagtgtccagcacatgaagtcccaggccaagccgggaaccccgggtgggacaggaggaccggccccgcagtactgacctgcaggaactccccaccccagggacaccgcctccccattttccggggcagagtggggactcacagaggcccccagccctgtgccccgctggattgcactttgagcccgtggggtgaggagttggcaatttggagagacaggatttgggggttctgccataataggaggggaaaatcaccccccagccacctcggggaactccagaccaagggtgagggcgcctttccctcaggactgggtgtgaccagaggaaaaggaagtgcccaacatctcccagcctccccaggtgcccccctcaccttgatgggtgcgttcccgcagaccaaagagagtgtgactcccttgccagctccagagtgggggggctgtcccagggggcaagaaggggtgtcagggcccagtgacaaaatcattggggtttgtagtcccaacttgctgctgtcaccaccaaactcaatcatttttttcccttgtaaatgcccctcccccagctgctgccttcatattgaaggtttttgagttttgtttttggtcttaatttttctccccgttccctttttgtttcttcgttttgtttttctaccgtccttgtcataactttgtgttggagggaacctgtttcactatggcctcctttgcccaagttgaaacaggggcccatcatcatgtctgtttccagaacagtgccttggtcatcccacatccccggaccccgcctgggacccccaagctgtgtcctatgaaggggtgtggggtgaggtagtgaaaagggcggtagttggtggtggaacccagaaacggacgccggtgcttggaggggttcttaaattatatttaaaaaagtaactttttgtataaataaaagaaaatgggacgtgtcccagctccaggggtaaaaaaaaaaaaaaaaaa

SEQ ID NO: 230 - protein, 987 aa, Homo sapiens
  REGION 1..987: note = EphB4
MELRVLLCWASLAAALEETLLNTKLETADLKWVTFPQVDGQWEELSGLDEEQHSVRTYEVCDVQRAPGQAHWLRTGWVPRRGAVHVYATLRFTMLECLSLPRAGRSCKETFTVFYYESDADTATALTPAWMENPYIKVDTVAAEHLTRKRPGAEATGKVNVKTLRLGPLSKAGFYLAFQDQGACMALLSLHLFYKKCAQLTVNLTRFPETVPRELVVPVAGSCVVDAVPAPGPSPSLYCREDGQWAEQPVTGCSCAPGFEAAEGNTKCRACAQGTFKPLSGEGSCQPCPANSHSNTIGSAVCQCRVGYFRARTDPRGAPCTTPPSAPRSVVSRLNGSSLHLEWSAPLESGGREDLTYALRCRECRPGGSCAPCGGDLTFDPGPRDLVEPWVVVRGLRPDFTYTFEVTALNGVSSLATGPVPFEPVNVTTDREVPPAVSDIRVTRSSPSSLSLAWAVPRAPSGAVLDYEVKYHEKGAEGPSSVRFLKTSENRAELRGLKRGASYLVQVRARSEAGYGPFGQEHHSQTQLDESEGWREQLALIAGTAVVGVVLVLVVIVVAVLCLRKQSNGREAEYSDKHGQYLIGHGTKVYIDPFTYEDPNEAVREFAKEIDVSYVKIEEVIGAGEFGEVCRGRLKAPGKKESCVAIKTLKGGYTERQRREFLSEASIMGQFEHPNIIRLEGVVTNSMPVMILTEFMENGALDSFLRLNDGQFTVIQLVGMLRGIASGMRYLAEMSYVHRDLAARNILVNSNLVCKVSDFGLSRFLEENSSDPTYTSSLGGKIPIRWTAPEAIAFRKFTSASDAWSYGIVMWEVMSFGERPYWDMSNQDVINAIEQDYRLPPPPDCPTSLHQLMLDCWQKDRNARPRFPQVVSALDKMIRNPASLKIVARENGGASHPLLDQRQPHYSAFGSVGEWLRAIKMGRYEESFAAAGFGSFELVSQISAEDLLRIGVTLAGHQKKILASVQHMKSQAKPGTPGGTGGPAPQY

SEQ ID NO: 231 - DNA, 4059 bp, Homo sapiens
  misc_feature 1..4059: note = EphB6
  source 1..4059: mol_type = genomic DNA
ggggcgggccgggccggcttgggaggggacgcggagggggcgggccgggctgcgttcgctccagccgcggctctacagcagcgggcggcgggacccgggacccagcttggcgacggcgatctcgacgcgggcccccaggatctcccggcgccccacctctggagcagcccctgccgccagcgtcaggtccaccccggaatcccagggactctcggcgccgaacggacccgggccgggtgcaacggggtccccggactggagaagacgcgggtggcaccgtgcgagctccaggagccccgggtccactgcgaggcctcggggggcgcagacctgcagagactgcggccaacgggaagaaataaagggattatagtccacccaattcacagacttctgagactcagacacgaggagagatagagaaccgccaatctctagatcaacaagcaaaggaggtgccaagcctgtttgtcttcattgtgacactggagtctagatgctgggaagtccaagatcagggtgccggcatggtcagttcctggcgaagcctctcttctaggtttcagactgccctcttctttgttgtgtcctcgaatggcagaaaaaggggtggctgttggaggaagggaggagagtaaatgaagagaaagaactggaataaccccttgcagaaaaaaaaaaaaagggaagcaagcttagctgtacaccctgagtcttgcaaaagctgcagccccacccaggagcagggtggtggctggggcgatggtggacgccctgaagatgtcccatggctactgaaggggctgcccagttagggaacagagtggcgggcatggtgtgtagcctatgggtgctgctcctggtgtcttcagttctggctctggaagaggtattgctggacaccaccggagagacatctgagattggctggctcacctacccaccaggggggtgggacgaggtgagtgttctggacgaccagcgacgcctgactcggacctttgaggcatgtcatgtggcaggggcccctccaggcaccgggcaggacaattggttgcagacacactttgtggagcggcgcggggcccagagggcgcacattcgactccacttctctgtgcgggcatgctccagcctgggtgtgagcggcggcacctgccgggagaccttcaccctttactaccgtcaggctgaggagcccgacagccctgacagcgtttcctcctggcacctcaaacgctggaccaaggtggacacaattgcagcagacgagagctttccctcctcctcctcctcctcctcctcttcttcctctgcagcgtgggctgtgggaccccacggggctgggcagcgggctggactgcaactgaacgtcaaagagcggagctttgggcctctcacccaacgcggcttctacgtggccttccaggacacgggggcctgcctggccctggtcgctgtcaggctcttctcctacacctgccctgccgtgctccgatcctttgcttcctttccagagacgcaggccagtggggctgggggggcctccctggtggcagctgtgggcacctgtgtggctcatgcagagccagaggaggatggagtagggggccaggcaggaggcagcccccccaggctgcactgcaacggggagggcaagtggatggtagctgtcgggggctgccgctgccagcctggataccaaccagcacgaggagacaaggcctgccaagcctgcccacgggggctctataagtcttctgctgggaatgctccctgctcaccatgccctgcccgcagtcacgctcccaacccagcagcccccgtttgcccctgcctggagggcttctaccgggccagttccgacccaccagaggccccctgcactggtcctccatcggctccccaggagctttggtttgaggtgcaaggctcagcactcatgctacactggcgcctgcctcgggagctggggggtcgaggggacctgctcttcaatgtcgtgtgcaaggagtgtgaaggccgccaggaacctgccagcggtggtgggggcacttgtcaccgctgcagggatgaggtccacttcgaccctcgccagagaggcctgactgagagccgagtgttagtggggggactccgggcacacgtaccctacatcttagaggtgcaggctgttaatggggtgtctgagctcagccctgaccctcctcaggctgcagccatcaatgtcagcaccagccatgaagtgccctctgctgtccctgtggtgcaccaggtgagccgggcatccaacagcatcacggtgtcctggccgcagcccgaccagaccaatgggaacatcctggactatcagctccgctactatgaccaggcagaagacgaatcccactccttcaccctgaccagcgagaccaacactgccaccgtgacacagctgagccctggccacatctatggtttccaggtgcgggcccggactgctgccggccacggcccctacgggggcaaagtctatttccagacacttcctcaaggggagctgtcttcccagcttccggaaagactctccttggtgatcggctccatcctgggggctttggccttcctcctgctggcagccatcaccgtgctggcggtcgtcttccagcggaagcggcgtgggactggctacacggagcagctgcagcaatacagcagcccaggactcggggtgaagtattacatcgacccctccacctacgaggacccctgtcaggccatccgagaacttgcccgggaagtcgatcctgcttatatcaagattgaggaggtcattgggacaggctcttttggagaagtgcgccagggccgcctgcagccacggggacggagggagcagactgtggccatccaggccctgtgggccgggggcgccgaaagcctgcagatgaccttcctgggccgggccgcagtgctgggtcagttccagcaccccaacatcctgcggctggagggcgtggtcaccaagagccgacccctcatggtgctgacggagttcatggagcttggccccctggacagcttcctcaggcagcgggagggccagttcagcagcctgcagctggtggccatgcagcggggagtggctgctgccatgcagtacctgtccagctttgccttcgtccatcgctcgctgtctgcccacagcgtgctggtgaatagccacttggtgtgcaaggtggcccgtcttggccacagtcctcagggcccaagttgtttgcttcgctgggcagccccagaggtcattgcacatggaaagcatacaacatccagtgatgtctggagctttgggatactcatgtgggaagtgatgagttatggagaacggccttactgggacatgagtgagcaggaggtactaaatgcaatagagcaggagttccggctgcccccgcctccaggctgtcctcctggattacatctacttatgttggacacttggcagaaggaccgtgcccggcggcctcattttgaccagctggtggctgcatttgacaagatgatccgcaagccagataccctgcaggctggcggggacccaggggaaaggccttcccaggcccttctgacccctgtggccctggactttccttgtctggactcaccccaggcctggctttcagccattggactggagtgctaccaggacaacttctccaagtttggcctctgtaccttcagtgatgtggctcagctcagcctagaagacctgcctgccctgggcatcaccctggctggccaccagaagaagctgctgcaccacatccagctccttcagcaacacctgaggcagcagggctcagtggaggtctgagaatgacgatacccgtgactcagccctggacactggtccgagaagggacatgtgggacgtgagccgggctccaacagcctctgtgagagatgccccacaccaaacccaaccctcccgatggctgcattccctggtcctccgcctctccaccagccccctcctcattaaagggaaagaagggaatttgcaaaaaaaaaaaaaaaaaa

SEQ ID NO: 232 - protein, 1006 aa, Homo sapiens
  REGION 1..1006: note = EphB6
MVCSLWVLLLVSSVLALEEVLLDTTGETSEIGWLTYPPGGWDEVSVLDDQRRLTRTFEACHVAGAPPGTGQDNWLQTHFVERRGAQRAHIRLHFSVRACSSLGVSGGTCRETFTLYYRQAEEPDSPDSVSSWHLKRWTKVDTIAADESFPSSSSSSSSSSSAAWAVGPHGAGQRAGLQLNVKERSFGPLTQRGFYVAFQDTGACLALVAVRLFSYTCPAVLRSFASFPETQASGAGGASLVAAVGTCVAHAEPEEDGVGGQAGGSPPRLHCNGEGKWMVAVGGCRCQPGYQPARGDKACQACPRGLYKSSAGNAPCSPCPARSHAPNPAAPVCPCLEGFYRASSDPPEAPCTGPPSAPQELWFEVQGSALMLHWRLPRELGGRGDLLFNVVCKECEGRQEPASGGGGTCHRCRDEVHFDPRQRGLTESRVLVGGLRAHVPYILEVQAVNGVSELSPDPPQAAAINVSTSHEVPSAVPVVHQVSRASNSITVSWPQPDQTNGNILDYQLRYYDQAEDESHSFTLTSETNTATVTQLSPGHIYGFQVRARTAAGHGPYGGKVYFQTLPQGELSSQLPERLSLVIGSILGALAFLLLAAITVLAVVFQRKRRGTGYTEQLQQYSSPGLGVKYYIDPSTYEDPCQAIRELAREVDPAYIKIEEVIGTGSFGEVRQGRLQPRGRREQTVAIQALWAGGAESLQMTFLGRAAVLGQFQHPNILRLEGVVTKSRPLMVLTEFMELGPLDSFLRQREGQFSSLQLVAMQRGVAAAMQYLSSFAFVHRSLSAHSVLVNSHLVCKVARLGHSPQGPSCLLRWAAPEVIAHGKHTTSSDVWSFGILMWEVMSYGERPYWDMSEQEVLNAIEQEFRLPPPPGCPPGLHLLMLDTWQKDRARRPHFDQLVAAFDKMIRKPDTLQAGGDPGERPSQALLTPVALDFPCLDSPQAWLSAIGLECYQDNFSKFGLCTFSDVAQLSLEDLPALGITLAGHQKKLLHHIQLLQQHLRQQGSVEV

SEQ ID NO: 233 - DNA, 3343 bp, Homo sapiens
  misc_feature 1..3343: note = FGFR1
  source 1..3343: mol_type = genomic DNA
gaattcgggatgtggagctggaagtgcctcctcttctgggctgtgctggtcacagccacactctgcaccgctaggccgtccccgaccttgcctgaacaagcccagccctggggagcccctgtggaagtggagtccttcctggtccaccccggtgacctgctgcagcttcgctgtcggctgcgggacgatgtgcagagcatcaactggctgcgggacggggtgcagctggcggaaagcaaccgcacccgcatcacaggggaggaggtggaggtgcaggactccgtgcccgcagactccggcctctatgcttgcgtaaccagcagcccctcgggcagtgacaccacctacttctccgtcaatgtttcagatgctctcccctcctcggaggatgatgatgatgatgatgactcctcttcagaggagaaagaaacagataacaccaaaccaaaccccgtagctccatattggacatccccagaaaagatggaaaagaaattgcatgcagtgccggctgccaagacagtgaagttcaaatgcccttccagtgggaccccaaaccccacactgcgctggttgaaaaatagcaaagaattcaaacctgaccacagaattggaggctacaaggtccgttatgccacctggagcatcataatggactctgtggtgccctctgacaagggcaactacacctgcattgtggagaatgagtacggcagcatcaaccacacataccagctggatgtcgtggagcggtcccctcaccggcccatcctgcaagcagggttgcccgccaacaaaacagtggccctgggtagcaacgtggagttcatgtgtaaggtgtacagtgacccgcagccgcacatccagtggctaaagcacatcgaggtgaatgggagcaagattggcccagacaacctgccttatgtccagatcttgaagactgctggagttaataccaccgacaaagagatggaggtgcttcacttaagaaatgtctcctttgaggacgcaggggagtatacgtgcttggcgggtaactctatcggactctcccatcactctgcatggttgaccgttctggaagccctggaagagaggccggcagtgatgacctcgcccctgtacctggagatcatcatctattgcacaggggccttcctcatctcctgcatggtggggtcggtcatcgtctacaagatgaagagtggtaccaagaagagtgacttccacagccagatggctgtgcacaagctggccaagagcatccctctgcgcagacaggtaacagtgtctgctgactccagtgcatccatgaactctggggttcttctggttcggccatcacggctctcctccagtgggactcccatgctagcaggggtctctgagtatgagcttcccgaagaccctcgctgggagctgcctcgggacagactggtcttaggcaaacccctgggagagggctgctttgggcaggtggtgttggcagaggctatcgggctggacaaggacaaacccaaccgtgtgaccaaagtggctgtgaagatgttgaagtcggacgcaacagagaaagacttgtcagacctgatctcagaaatggagatgatgaagatgatcgggaagcataagaatatcatcaacctgctgggggcctgcacgcaggatggtcccttgtatgtcatcgtggagtatgcctccaagggcaacctgcgggagtacctgcaggcccggaggcccccagggctggaatactgctacaaccccagccacaacccagaggagcagctctcctccaaggacctggtgtcctgcgcctaccaggtggcccgaggcatggagtatctggcctccaagaagtgcatacaccgagacctggcagccaggaatgtcctggtgacagaggacaatgtgatgaagatagcagactttggcctcgcacgggacattcaccacatcgactactataaaaagacaaccaacggccgactgcctgtgaagtggatggcacccgaggcattatttgaccggatctacacccaccagagtgatgtgtggtctttcggggtgctcctgtgggagatcttcactctgggcggctccccataccccggtgtgcctgtggaggaacttttcaagctgctgaaggagggtcaccgcatggacaagcccagtaactgcaccaacgagctgtacatgatgatgcgggactgctggcatgcagtgccctcacagagacccaccttcaagcagctggtggaagacctggaccgcatcgtggccttgacctccaaccaggagtacctggacctgtccatgcccctggaccagtactcccccagctttcccgacacccggagctctacgtgctcctcaggggaggattccgtcttctctcatgagccgctgcccgaggagccctgcctgccccgacacccagcccagcttgccaatggcggactcaaacgccgctgactgccacccacacgccctccccagactccaccgtcagctgtaaccctcacccacagcccctgctgggcccaccacctgtccgtccctgtcccctttcctgctggcaggagccggctgcctaccaggggccttcctgtgtggcctgccttcaccccactcagctcacctctccctccacctcctctccacctgctggtgagaggtgcaaagaggcagatctttgctgccagccacttcatcccctcccagatgttggaccaacacccctccctgccacagcatcgcctggagggcagggagtgggagccaatgaacaggcatgcaagtgagagcttcctgagctttctctgtcggtttggtctgttttgccttcacccataagcccctcgcactctggtggcaggtgccttgtcctcagggctacagcagtagggaggtcagtgcttcgtgcctcgattgaaggtgacctctgccccagataggtggtgcagtggcttattaattccgatactagtttgctttgctgaccaaatgcctggtaccagaggatggtgaggcgaaggccaggttgggggcagtgttgtggccctggggccagccccaaactgggggctctgtatatagctatgaagaaaacacaaagtgtataaatctgagtatatatttacatgtctttttaaaagggtcgttaccagagatttacccatcgggtaagatgctcctggtggctgggaggcatcagttgctatatattaaaaacaaaaaagaaaaaaaaggaaaatgtttttaaaaaggtcatatattttttgctacttttgctgttttatttttttaaattatgttctaaactcgtgccgctcgtgccgaattc

SEQ ID NO: 234 - protein, 822 aa, Homo sapiens [sequence omitted]

SEQ ID NO: 235 - DNA, 4587 bp, Homo sapiens
  misc_feature 1..4587: note = FGFR2
  source 1..4587: mol_type = genomic DNA
gagcgggcgagggagcgcgcgcggccgccacaaagctcgggcgccgcggggctgcatgcggcgtacctggcccggcgcggcgactgctctccgggctggcgggggccggccgcgagccccgggggccccgaggccgcagcttgcctgcgcgctctgagccttcgcaactcgcgagcaaagtttggtggaggcaacgccaagcctgagtcctttcttcctctcgttccccaaatccgagggcagcccgcgggcgtcatgcccgcgctcctccgcagcctggggtacgcgtgaagcccgggaggcttggcgccggcgaagacccaaggaccactcttctgcgtttggagttgctccccacaaccccgggctcgtcgctttctccatcccgacccacgcggggcgcggggacaacacaggtcgcggaggagcgttgccattcaagtgactgcagcagcagcggcagcgcctcggttcctgagcccaccgcaggctgaaggcattgcgcgtagtccatgcccgtagaggaagtgtgcagatgggattaacgtccacatggagatatggaagaggaccggggattggtaccgtaaccatggtcagctggggtcgtttcatctgcctggtcgtggtcaccatggcaaccttgtccctggcccggccctccttcagtttagttgaggataccacattagagccagaagagccaccaaccaaataccaaatctctcaaccagaagtgtacgtggctgcgccaggggagtcgctagaggtgcgctgcctgttgaaagatgccgccgtgatcagttggactaaggatggggtgcacttggggcccaacaataggacagtgcttattggggagtacttgcagataaagggcgccacgcctagagactccggcctctatgcttgtactgccagtaggactgtagacagtgaaacttggtacttcatggtgaatgtcacagatgccatctcatccggagatgatgaggatgacaccgatggtgcggaagattttgtcagtgagaacagtaacaacaagagagcaccatactggaccaacacagaaaagatggaaaagcggctccatgctgtgcctgcggccaacactgtcaagtttcgctgcccagccggggggaacccaatgccaaccatgcggtggctgaaaaacgggaaggagtttaagcaggagcatcgcattggaggctacaaggtacgaaaccagcactggagcctcattatggaaagtgtggtcccatctgacaagggaaattatacctgtgtggtggagaatgaatacgggtccatcaatcacacgtaccacctggatgttgtggagcgatcgcctcaccggcccatcctccaagccggactgccggcaaatgcctccacagtggtcggaggagacgtagagtttgtctgcaaggtttacagtgatgcccagccccacatccagtggatcaagcacgtggaaaagaacggcagtaaatacgggcccgacgggctgccctacctcaaggttctcaaggccgccggtgttaacaccacggacaaagagattgaggttctctatattcggaatgtaacttttgaggacgctggggaatatacgtgcttggcgggtaattctattgggatatcctttcactctgcatggttgacagttctgccagcgcctggaagagaaaaggagattacagcttccccagactacctggagatagccatttactgcataggggtcttcttaatcgcctgtatggtggtaacagtcatcctgtgccgaatgaagaacacgaccaagaagccagacttcagcagccagccggctgtgcacaagctgaccaaacgtatccccctgcggagacaggtaacagtttcggctgagtccagctcctccatgaactccaacaccccgctggtgaggataacaacacgcctctcttcaacggcagacacccccatgctggcaggggtctccgagtatgaacttccagaggacccaaaatgggagtttccaagagataagctgacactgggcaagcccctgggagaaggttgctttgggcaagtggtcatggcggaagcagtgggaattgacaaagacaagcccaaggaggcggtcaccgtggccgtgaagatgttgaaagatgatgccacagagaaagacctttctgatctggtgtcagagatggagatgatgaagatgattgggaaacacaagaatatcataaatcttcttggagcctgcacacaggatgggcctctctatgtcatagttgagtatgcctctaaaggcaacctccgagaatacctccgagcccggaggccacccgggatggagtactcctatgacattaaccgtgttcctgaggagcagatgaccttcaaggacttggtgtcatgcacctaccagctggccagaggcatggagtacttggcttcccaaaaatgtattcatcgagatttagcagccagaaatgttttggtaacagaaaacaatgtgatgaaaatagcagactttggactcgccagagatatcaacaatatagactattacaaaaagaccaccaatgggcggcttccagtcaagtggatggctccagaagccctgtttgatagagtatacactcatcagagtgatgtctggtccttcggggtgttaatgtgggagatcttcactttagggggctcgccctacccagggattcccgtggaggaactttttaagctgctgaaggaaggacacagaatggataagccagccaactgcaccaacgaactgtacatgatgatgagggactgttggcatgcagtgccctcccagagaccaacgttcaagcagttggtagaagacttggatcgaattctcactctcacaaccaatgaggaatacttggacctcagccaacctctcgaacagtattcacctagttaccctgacacaagaagttcttgttcttcaggagatgattctgttttttctccagaccccatgccttacgaaccatgccttcctcagtatccacacataaacggcagtgttaaaacatgaatgactgtgtctgcctgtccccaaacaggacagcactgggaacctagctacactgagcagggagaccatgcctcccagagcttgttgtctccacttgtatatatggatcagaggagtaaataattggaaaagtaatcagcatatgtgtaaagatttatacagttgaaaacttgtaatcttccccaggaggagaagaaggtttctggagcagtggactgccacaagccaccatgtaacccctctcacctgccgtgcgtactggctgtggaccagtaggactcaaggtggacgtgcgttctgccttccttgttaattttgtaataattggagaagatttatgtcagcacacacttacagagcacaaatgcagtatataggtgctggatgtatgtaaatatattcaaattatgtataaatatatattatatatttacaaggagttattttttgtattgattttaaatggatgtcccaatgcacctagaaaattggtctctctttttttaatagctatttgctaaatgctgttcttacacataatttcttaattttcaccgagcagaggtggaaaaatacttttgctttcagggaaaatggtataacgttaatttattaataaattggtaatatacaaaacaattaatcatttatagttttttttgtaatttaagtggcatttctatgcaggcagcacagcagactagttaatctattgcttggacttaactagttatcagatcctttgaaaagagaatatttacaatatatgactaatttggggaaaatgaagttttgatttatttgtgtttaaatgctgctgtcagacgattgttcttagacctcctaaatgccccatattaaaagaactcattcataggaaggtgtttcattttggtgtgcaaccctgtcattacgtcaacgcaacgtctaactggacttcccaagataaatggtaccagcgtcctcttaaaagatgccttaatccattccttgaggacagaccttagttgaaatgatagcagaatgtgcttctctctggcagctggccttctgcttctgagttgcacattaatcagattagcctgattctcttcagtgaattttgataatggcttccagactctttgcgttggagacgcctgttaggatcttcaagtcccatcatagaaaattgaaacacagagttgttctgctgatagttttggggatacgtccatctttttaagggattgctttcatctaattctggcaggacctcaccaaaagatccagcctcatacctacatcagacaaaatatcgccgttgttccttctgtactaaagtattgtgttttgctttggaaacacccactcactttgcaatagccgtgcaagatgaatgcagattacactgatcttatgtgttacaaaattggagaaagtatttaataaaacctgttaatttttatactgacaataaaaatgtttctacagatattaatgttaacaagacaaaataaatgtcacgcaacttaaaaaaaaaaaaaaaa

SEQ ID NO: 236 - protein, 821 aa, Homo sapiens
  REGION 1..821: note = FGFR2
MVSWGRFICLVVVTMATLSLARPSFSLVEDTTLEPEEPPTKYQISQPEVYVAAPGESLEVRCLLKDAAVISWTKDGVHLGPNNRTVLIGEYLQIKGATPRDSGLYACTASRTVDSETWYFMVNVTDAISSGDDEDDTDGAEDFVSENSNNKRAPYWTNTEKMEKRLHAVPAANTVKFRCPAGGNPMPTMRWLKNGKEFKQEHRIGGYKVRNQHWSLIMESVVPSDKGNYTCVVENEYGSINHTYHLDVVERSPHRPILQAGLPANASTVVGGDVEFVCKVYSDAQPHIQWIKHVEKNGSKYGPDGLPYLKVLKAAGVNTTDKEIEVLYIRNVTFEDAGEYTCLAGNSIGISFHSAWLTVLPAPGREKEITASPDYLEIAIYCIGVFLIACMVVTVILCRMKNTTKKPDFSSQPAVHKLTKRIPLRRQVTVSAESSSSMNSNTPLVRITTRLSSTADTPMLAGVSEYELPEDPKWEFPRDKLTLGKPLGEGCFGQVVMAEAVGIDKDKPKEAVTVAVKMLKDDATEKDLSDLVSEMEMMKMIGKHKNIINLLGACTQDGPLYVIVEYASKGNLREYLRARRPPGMEYSYDINRVPEEQMTFKDLVSCTYQLARGMEYLASQKCIHRDLAARNVLVTENNVMKIADFGLARDINNIDYYKKTTNGRLPVKWMAPEALFDRVYTHQSDVWSFGVLMWEIFTLGGSPYPGIPVEELFKLLKEGHRMDKPANCTNELYMMMRDCWHAVPSQRPTFKQLVEDLDRILTLTTNEEYLDLSQPLEQYSPSYPDTRSSCSSGDDSVFSPDPMPYEPCLPQYPHINGSVKT

SEQ ID NO: 237 - DNA, 4093 bp, Homo sapiens
  misc_feature 1..4093: note = FGFR3
  source 1..4093: mol_type = genomic DNA
cgcgcgctgcctgaggacgccgcggcccccgcccccgccatgggcgcccctgcctgcgccctcgcgctctgcgtggccgtggccatcgtggccggcgcctcctcggagtccttggggacggagcagcgcgtcgtggggcgagcggcagaagtcccgggcccagagcccggccagcaggagcagttggtcttcggcagcggggatgctgtggagctgagctgtcccccgcccgggggtggtcccatggggcccactgtctgggtcaaggatggcacagggctggtgccctcggagcgtgtcctggtggggccccagcggctgcaggtgctgaatgcctcccacgaggactccggggcctacagctgccggcagcggctcacgcagcgcgtactgtgccacttcagtgtgcgggtgacagacgctccatcctcgggagatgacgaagacggggaggacgaggctgaggacacaggtgtggacacaggggccccttactggacacggcccgagcggatggacaagaagctgctggccgtgccggccgccaacaccgtccgcttccgctgcccagccgctggcaaccccactccctccatctcctggctgaagaacggcagggagttccgcggcgagcaccgcattggaggcatcaagctgcggcatcagcagtggagcctggtcatggaaagcgtggtgccctcggaccgcggcaactacacctgcgtcgtggagaacaagtttggcagcatccggcagacgtacacgctggacgtgctggagcgctccccgcaccggcccatcctgcaggcggggctgccggccaaccagacggcggtgctgggcagcgacgtggagttccactgcaaggtgtacagtgacgcacagccccacatccagtggctcaagcacgtggaggtgaacggcagcaaggtgggcccggacggcacaccctacgttaccgtgctcaagacggcgggcgctaacaccaccgacaaggagctagaggttctctccttgcacaacgtcacctttgaggacgccggggagtacacctgcctggcgggcaattctattgggttttctcatcactctgcgtggctggtggtgctgccagccgaggaggagctggtggaggctgacgaggcgggcagtgtgtatgcaggcatcctcagctacggggtgggcttcttcctgttcatcctggtggtggcggctgtgacgctctgccgcctgcgcagcccccccaagaaaggcctgggctcccccaccgtgcacaagatctcccgcttcccgctcaagcgacaggtgtccctggagtccaacgcgtccatgagctccaacacaccactggtgcgcatcgcaaggctgtcctcaggggagggccccacgctggccaatgtctccgagctcgagctgcctgccgaccccaaatgggagctgtctcgggcccggctgaccctgggcaagccccttggggagggctgcttcggccaggtggtcatggcggaggccatcggcattgacaaggaccgggccgccaagcctgtcaccgtagccgtgaagatgctgaaagacgatgccactgacaaggacctgtcggacctggtgtctgagatggagatgatgaagatgatcgggaaacacaaaaacatcatcaacctgctgggcgcctgcacgcagggcgggcccctgtacgtgctggtggagtacgcggccaagggtaacctgcgggagtttctgcgggcgcggcggcccccgggcctggactactccttcgacacctgcaagccgcccgaggagcagctcaccttcaaggacctggtgtcctgtgcctaccaggtggcccggggcatggagtacttggcctcccagaagtgcatccacagggacctggctgcccgcaatgtgctggtgaccgaggacaacgtgatgaagatcgcagacttcgggctggcccgggacgtgcacaacctcgactactacaagaagacaaccaacggccggctgcccgtgaagtggatggcgcctgaggccttgtttgaccgagtctacactcaccagagtgacgtctggtcctttggggtcctgctctgggagatcttcacgctggggggctccccgtaccccggcatccctgtggaggagctcttcaagctgctgaaggagggccaccgcatggacaagcccgccaactgcacacacgacctgtacatgatcatgcgggagtgctggcatgccgcgccctcccagaggcccaccttcaagcagctggtggaggacctggaccgtgtccttaccgtgacgtccaccgacgagtacctggacctgtcggcgcctttcgagcagtactccccgggtggccaggacacccccagctccagctcctcaggggacgactccgtgtttgcccacgacctgctgcccccggccccacccagcagtgggggctcgcggacgtgaagggccactggtccccaacaatgtgaggggtccctagcagccctccctgctgctggtgcacagccactccccggcatgagactcagtgcagatggagagacagctacacagagctttggtctgtgtgtgtgtgtgtgcgtgtgtgtgtgtgtgtgcacatccgcgtgtgcctgtgtgcgtgcgcatcttgcctccaggtgcagaggtaccctgggtgtccccgctgctgtgcaacggtctcctgactggtgctgcagcaccgaggggcctttgttctggggggacccagtgcagaatgtaagtgggcccacccggtgggaccccgtggggcagggagctgggcccgacatggctcggcctctgcctttgcaccacgggacatcacagggtgcgctcggcccctcccacacccaaagctgagcctgcagggaagccccacatgtccagcaccttgtgcctggggtgttagtggcaccgcctccccacctccaggctttcccacttcccaccctgcccctcagagactgaaattacgggtacctgaagatgggagcctttaccttttatgcaaaaggtttattccggaaactagtgtacatttctataaatagatgctgtgtatatggtatatatacatatatatatataacatatatggaagaggaaaaggctggtacaacggaggcctgcgaccctgggggcacaggaggcaggcatggccctgggcggggcgtgggggggcgtggagggaggccccaggggtctcacccatgcaagcagaggaccagggctttttctggcaccgcagttttgttttaaaactggacctgtatatttgtaaagctatttatgggcccctggcactcttgttcccacaccccaacacttccagcatttagctggccacatggcggagagttttaatttttaacttattgacaaccgagaaggtttatcccgccgatagagggacggccaagaatgtacgtccagcctgccccggagctggaggatcccctccaagcctaaaaggttgttaatagttggaggtgattccagtgaagatattttatttgctttgtcctttttcaggagaattagatttctataggatttttctttaggagatttattttttggacttcaaagcaagctggtattttcatacaaattcttctaattgctgtgtgtcccaggcagggagacggtttccagggaggggccggccctgtgtgcaggttccgatgttattagatgttacaagtttatatatatctatatatataatttattgagtttttacaagatgtatttgttgtagacttaacacttcttacgcaatgcttctagagttttatagcctggactgctacctttcaaagcttggagggaagccgtgaattcagttggttcgttctgtactgttactgggccctgagtctgggcagctgtcccttgcttgcctgcagggccatggctcagggtggtctcttcttggggcccagtgcatggtggccagaggtgtcacccaaaccggcaggtgcgattttgttaacccagcgacgaactttccgaaaaataaagacacctggttgctaacctgaaaaaaaaaaaaaaaaaaaaaaaaaaaaaa

SEQ ID NO: 238 - protein, 806 aa, Homo sapiens
  REGION 1..806: note = FGFR3
MGAPACALALCVAVAIVAGASSESLGTEQRVVGRAAEVPGPEPGQQEQLVFGSGDAVELSCPPPGGGPMGPTVWVKDGTGLVPSERVLVGPQRLQVLNASHEDSGAYSCRQRLTQRVLCHFSVRVTDAPSSGDDEDGEDEAEDTGVDTGAPYWTRPERMDKKLLAVPAANTVRFRCPAAGNPTPSISWLKNGREFRGEHRIGGIKLRHQQWSLVMESVVPSDRGNYTCVVENKFGSIRQTYTLDVLERSPHRPILQAGLPANQTAVLGSDVEFHCKVYSDAQPHIQWLKHVEVNGSKVGPDGTPYVTVLKTAGANTTDKELEVLSLHNVTFEDAGEYTCLAGNSIGFSHHSAWLVVLPAEEELVEADEAGSVYAGILSYGVGFFLFILVVAAVTLCRLRSPPKKGLGSPTVHKISRFPLKRQVSLESNASMSSNTPLVRIARLSSGEGPTLANVSELELPADPKWELSRARLTLGKPLGEGCFGQVVMAEAIGIDKDRAAKPVTVAVKMLKDDATDKDLSDLVSEMEMMKMIGKHKNIINLLGACTQGGPLYVLVEYAAKGNLREFLRARRPPGLDYSFDTCKPPEEQLTFKDLVSCAYQVARGMEYLASQKCIHRDLAARNVLVTEDNVMKIADFGLARDVHNLDYYKKTTNGRLPVKWMAPEALFDRVYTHQSDVWSFGVLLWEIFTLGGSPYPGIPVEELFKLLKEGHRMDKPANCTHDLYMIMRECWHAAPSQRPTFKQLVEDLDRVLTVTSTDEYLDLSAPFEQYSPGGQDTPSSSSSGDDSVFAHDLLPPAPPSSGGSRT

SEQ ID NO: 239 - DNA, 3040 bp, Homo sapiens
  misc_feature 1..3040: note = FGFR4
  source 1..3040: mol_type = genomic DNA
ctcgctcccggccgaggagcgctcgggctgtctgcggaccctgccgcgtgcaggggtcgcggccggctggagctgggagtgaggcggcggaggagccaggtgaggaggagccaggaaggcagttggtgggaagtccagcttgggtccctgagagctgtgagaaggagatgcggctgctgctggccctgttgggggtcctgctgagtgtgcctgggcctccagtcttgtccctggaggcctctgaggaagtggagcttgagccctgcctggctcccagcctggagcagcaagagcaggagctgacagtagcccttgggcagcctgtgcgtctgtgctgtgggcgggctgagcgtggtggccactggtacaaggagggcagtcgcctggcacctgctggccgtgtacggggctggaggggccgcctagagattgccagcttcctacctgaggatgctggccgctacctctgcctggcacgaggctccatgatcgtcctgcagaatctcaccttgattacaggtgactccttgacctccagcaacgatgatgaggaccccaagtcccatagggacccctcgaataggcacagttacccccagcaagcaccctactggacacacccccagcgcatggagaagaaactgcatgcagtacctgcggggaacaccgtcaagttccgctgtccagctgcaggcaaccccacgcccaccatccgctggcttaaggatggacaggcctttcatggggagaaccgcattggaggcattcggctgcgccatcagcactggagtctcgtgatggagagcgtggtgccctcggaccgcggcacatacacctgcctggtagagaacgctgtgggcagcatccgctataactacctgctagatgtgctggagcggtccccgcaccggcccatcctgcaggccgggctcccggccaacaccacagccgtggtgggcagcgacgtggagctgctgtgcaaggtgtacagcgatgcccagccccacatccagtggctgaagcacatcgtcatcaacggcagcagcttcggagccgacggtttcccctatgtgcaagtcctaaagactgcagacatcaatagctcagaggtggaggtcctgtacctgcggaacgtgtcagccgaggacgcaggcgagtacacctgcctcgcaggcaattccatcggcctctcctaccagtctgcctggctcacggtgctgccagaggaggaccccacatggaccgcagcagcgcccgaggccaggtatacggacatcatcctgtacgcgtcgggctccctggccttggctgtgctcctgctgctggccgggctgtatcgagggcaggcgctccacggccggcacccccgcccgcccgccactgtgcagaagctctcccgcttccctctggcccgacagttctccctggagtcaggctcttccggcaagtcaagctcatccctggtacgaggcgtgcgtctctcctccagcggccccgccttgctcgccggcctcgtgagtctagatctacctctcgacccactatgggagttcccccgggacaggctggtgcttgggaagcccctaggcgagggctgctttggccaggtagtacgtgcagaggcctttggcatggaccctgcccggcctgaccaagccagcactgtggccgtcaagatgctcaaagacaacgcctctgacaaggacctggccgacctggtctcggagatggaggtgatgaagctgatcggccgacacaagaacatcatcaacctgcttggtgtctgcacccaggaagggcccctgtacgtgatcgtggagtgcgccgccaagggaaacctgcgggagttcctgcgggcccggcgccccccaggccccgacctcagccccgacggtcctcggagcagtgaggggccgctctccttcccagtcctggtctcctgcgcctaccaggtggcccgaggcatgcagtatctggagtcccggaagtgtatccaccgggacctggctgcccgcaatgtgctggtgactgaggacaatgtgatgaagattgctgactttgggctggcccgcggcgtccaccacattgactactataagaaaaccagcaacggccgcctgcctgtgaagtggatggcgcccgaggccttgtttgaccgggtgtacacacaccagagtgacgtgtggtcttttgggatcctgctatgggagatcttcaccctcgggggctccccgtatcctggcatcccggtggaggagctgttctcgctgctgcgggagggacatcggatggaccgacccccacactgccccccagagctgtacgggctgatgcgtgagtgctggcacgcagcgccctcccagaggcctaccttcaagcagctggtggaggcgctggacaaggtcctgctggccgtctctgaggagtacctcgacctccgcctgaccttcggaccctattccccctctggtggggacgccagcagcacctgctcctccagcgattctgtcttcagccacgaccccctgccattgggatccagctccttccccttcgggtctggggtgcagacatgagcaaggctcaaggctgtgcaggcacataggctggtggccttgggccttggggctcagccacagcctgacacagtgctcgaccttgatagcatggggcccctggcccagagttgctgtgccgtgtccaagggccgtgcccttgcccttggagctgccgtgcctgtgtcctgatggcccaaatgtcagggttctgctcggcttcttggaccttggcgcttagtccccatcccgggtttggctgagcctggctggagagctgctatgctaaacctcctgcctcccaataccagcaggaggttctgggcctctgaaccccctttccccacacctccccctgctgctgctgccccagcgtcttgacgggagcattggcccctgagcccagagaagctggaagcctgccgaaaacaggagcaaatggcgttttataaattatttttttgaaataaaaaaaaaaaaaaaaa

SEQ ID NO: 240 - protein, 802 aa, Homo sapiens
  REGION 1..802: note = FGFR4
MRLLLALLGVLLSVPGPPVLSLEASEEVELEPCLAPSLEQQEQELTVALGQPVRLCCGRAERGGHWYKEGSRLAPAGRVRGWRGRLEIASFLPEDAGRYLCLARGSMIVLQNLTLITGDSLTSSNDDEDPKSHRDPSNRHSYPQQAPYWTHPQRMEKKLHAVPAGNTVKFRCPAAGNPTPTIRWLKDGQAFHGENRIGGIRLRHQHWSLVMESVVPSDRGTYTCLVENAVGSIRYNYLLDVLERSPHRPILQAGLPANTTAVVGSDVELLCKVYSDAQPHIQWLKHIVINGSSFGADGFPYVQVLKTADINSSEVEVLYLRNVSAEDAGEYTCLAGNSIGLSYQSAWLTVLPEEDPTWTAAAPEARYTDIILYASGSLALAVLLLLAGLYRGQALHGRHPRPPATVQKLSRFPLARQFSLESGSSGKSSSSLVRGVRLSSSGPALLAGLVSLDLPLDPLWEFPRDRLVLGKPLGEGCFGQVVRAEAFGMDPARPDQASTVAVKMLKDNASDKDLADLVSEMEVMKLIGRHKNIINLLGVCTQEGPLYVIVECAAKGNLREFLRARRPPGPDLSPDGPRSSEGPLSFPVLVSCAYQVARGMQYLESRKCIHRDLAARNVLVTEDNVMKIADFGLARGVHHIDYYKKTSNGRLPVKWMAPEALFDRVYTHQSDVWSFGILLWEIFTLGGSPYPGIPVEELFSLLREGHRMDRPPHCPPELYGLMRECWHAAPSQRPTFKQLVEALDKVLLAVSEEYLDLRLTFGPYSPSGGDASSTCSSSDSVFSHDPLPLGSSSFPFGSGVQT

SEQ ID NO: 241 - DNA, 6641 bp, Homo sapiens
  misc_feature 1..6641: note = MET
  source 1..6641: mol_type = genomic DNA
gccctcgccgcccgcggcgccccgagcgctttgtgagcagatgcggagccgagtggagggcgcgagccagatgcggggcgacagctgacttgctgagaggaggcggggaggcgcggagcgcgcgtgtggtccttgcgccgctgacttctccactggttcctgggcaccgaaagataaacctctcataatgaaggcccccgctgtgcttgcacctggcatcctcgtgctcctgtttaccttggtgcagaggagcaatggggagtgtaaagaggcactagcaaagtccgagatgaatgtgaatatgaagtatcagcttcccaacttcaccgcggaaacacccatccagaatgtcattctacatgagcatcacattttccttggtgccactaactacatttatgttttaaatgaggaagaccttcagaaggttgctgagtacaagactgggcctgtgctggaacacccagattgtttcccatgtcaggactgcagcagcaaagccaatttatcaggaggtgtttggaaagataacatcaacatggctctagttgtcgacacctactatgatgatcaactcattagctgtggcagcgtcaacagagggacctgccagcgacatgtctttccccacaatcatactgctgacatacagtcggaggttcactgcatattctccccacagatagaagagcccagccagtgtcctgactgtgtggtgagcgccctgggagccaaagtcctttcatctgtaaaggaccggttcatcaacttctttgtaggcaataccataaattcttcttatttcccagatcatccattgcattcgatatcagtgagaaggctaaaggaaacgaaagatggttttatgtttttgacggaccagtcctacattgatgttttacctgagttcagagattcttaccccattaagtatgtccatgcctttgaaagcaacaattttatttacttcttgacggtccaaagggaaactctagatgctcagacttttcacacaagaataatcaggttctgttccataaactctggattgcattcctacatggaaatgcctctggagtgtattctcacagaaaagagaaaaaagagatccacaaagaaggaagtgtttaatatacttcaggctgcgtatgtcagcaagcctggggcccagcttgctagacaaataggagccagcctgaatgatgacattcttttcggggtgttcgcacaaagcaagccagattctgccgaaccaatggatcgatctgccatgtgtgcattccctatcaaatatgtcaacgacttcttcaacaagatcgtcaacaaaaacaatgtgagatgtctccagcatttttacggacccaatcatgagcactgctttaataggacacttctgagaaattcatcaggctgtgaagcgcgccgtgatgaatatcgaacagagtttaccacagctttgcagcgcgttgacttattcatgggtcaattcagcgaagtcctcttaacatctatatccaccttcattaaaggagacctcaccatagctaatcttgggacatcagagggtcgcttcatgcaggttgtggtttctcgatcaggaccatcaacccctcatgtgaattttctcctggactcccatccagtgtctccagaagtgattgtggagcatacattaaaccaaaatggctacacactggttatcactgggaagaagatcacgaagatcccattgaatggcttgggctgcagacatttccagtcctgcagtcaatgcctctctgccccaccctttgttcagtgtggctggtgccacgacaaatgtgtgcgatcggaggaatgcctgagcgggacatggactcaacagatctgtctgcctgcaatctacaaggttttcccaaatagtgcaccccttgaaggagggacaaggctgaccatatgtggctgggactttggatttcggaggaataataaatttgatttaaagaaaactagagttctccttggaaatgagagctgcaccttgactttaagtgagagcacgatgaatacattgaaatgcacagttggtcctgccatgaataagcatttcaatatgtccataattatttcaaatggccacgggacaacacaatacagtacattctcctatgtggatcctgtaataacaagtatttcgccgaaatacggtcctatggctggtggcactttacttactttaactggaaattacctaaacagtgggaattctagacacatttcaattggtggaaaaacatgtactttaaaaagtgtgtcaaacagtattcttgaatgttataccccagcccaaaccatttcaactgagtttgctgttaaattgaaaattgacttagccaaccgagagacaagcatcttcagttaccgtgaagatcccattgtctatgaaattcatccaaccaaatcttttattagtggtgggagcacaataacaggtgttgggaaaaacctgaattcagttagtgtcccgagaatggtcataaatgtgcatgaagcaggaaggaactttacagtggcatgtcaacatcgctctaattcagagataatctgttgtaccactccttccctgcaacagctgaatctgcaactccccctgaaaaccaaagcctttttcatgttagatgggatcctttccaaatactttgatctcatttatgtacataatcctgtgtttaagccttttgaaaagccagtgatgatctcaatgggcaatgaaaatgtactggaaattaagggaaatgatattgaccctgaagcagttaaaggtgaagtgttaaaagttggaaataagagctgtgagaatatacacttacattctgaagccgttttatgcacggtccccaatgacctgctgaaattgaacagcgagctaaatatagagtggaagcaagcaatttcttcaaccgtccttggaaaagtaatagttcaaccagatcagaatttcacaggattgattgctggtgttgtctcaatatcaacagcactgttattactacttgggtttttcctgtggctgaaaaagagaaagcaaattaaagatctgggcagtgaattagttcgctacgatgcaagagtacacactcctcatttggataggcttgtaagtgcccgaagtgtaagcccaactacagaaatggtttcaaatgaatctgtagactaccgagctacttttccagaagatcagtttcctaattcatctcagaacggttcatgccgacaagtgcagtatcctctgacagacatgtcccccatcctaactagtggggactctgatatatccagtccattactgcaaaatactgtccacattgacctcagtgctctaaatccagagctggtccaggcagtgcagcatgtagtgattgggcccagtagcctgattgtgcatttcaatgaagtcataggaagagggcattttggttgtgtatatcatgggactttgttggacaatgatggcaagaaaattcactgtgctgtgaaatccttgaacagaatcactgacataggagaagtttcccaatttctgaccgagggaatcatcatgaaagattttagtcatcccaatgtcctctcgctcctgggaatctgcctgcgaagtgaagggtctccgctggtggtcctaccatacatgaaacatggagatcttcgaaatttcattcgaaatgagactcataatccaactgtaaaagatcttattggctttggtcttcaagtagccaaaggcatgaaatatcttgcaagcaaaaagtttgtccacagagacttggctgcaagaaactgtatgctggatgaaaaattcacagtcaaggttgctgattttggtcttgccagagacatgtatgataaagaatactatagtgtacacaacaaaacaggtgcaaagctgccagtgaagtggatggctttggaaagtctgcaaactcaaaagtttaccaccaagtcagatgtgtggtcctttggcgtgctcctctgggagctgatgacaagaggagccccaccttatcctgacgtaaacacctttgatataactgtttacttgttgcaagggagaagactcctacaacccgaatactgcccagaccccttatatgaagtaatgctaaaatgctggcaccctaaagccgaaatgcgcccatccttttctgaactggtgtcccggatatcagcgatcttctctactttcattggggagcactatgtccatgtgaacgctacttatgtgaacgtaaaatgtgtcgctccgtatccttctctgttgtcatcagaagataacgctgatgatgaggtggacacacgaccagcctccttctgggagacatcatagtgctagtactatgtcaaagcaacagtccacactttgtccaatggttttttcactgcctgacctttaaaaggccatcgatattctttgctcttgccaaaattgcactattataggacttgtattgttatttaaattactggattctaaggaatttcttatctgacagagcatcagaaccagaggcttggtcccacaggccacggaccaatggcctgcagccgtgacaacactcctgtcatattggagtccaaaacttgaattctgggttgaattttttaaaaatcaggtaccacttgatttcatatgggaaattgaagcaggaaatattgagggcttcttgatcacagaaaactcagaagagatagtaatgctcaggacaggagcggcagccccagaacaggccactcatttagaattctagtgtttcaaaacacttttgtgtgttgtatggtcaataacatttttcattactgatggtgtcattcacccattaggtaaacattcccttttaaatgtttgtttgttttttgagacaggatctcactctgttgccagggctgtagtgcagtggtgtgatcatagctcactgcaacctccacctcccaggctcaagcctcccgaatagctgggactacaggcgcacaccaccatccccggctaatttttgtattttttgtagagacggggttttgccatgttgccaaggctggtttcaaactcctggactcaagaaatccacccacctcagcctcccaaagtgctaggattacaggcatgagccactgcgcccagcccttataaatttttgtatagacattcctttggttggaagaatatttataggcaatacagtcaaagtttcaaaatagcatcacacaaaacatgtttataaatgaacaggatgtaatgtacatagatgacattaagaaaatttgtatgaaataatttagtcatcatgaaatatttagttgtcatataaaaacccactgtttgagaatgatgctactctgatctaatgaatgtgaacatgtagatgttttgtgtgtatttttttaaatgaaaactcaaaataagacaagtaatttgttgataaatatttttaaagataactcagcatgtttgtaaagcaggatacattttactaaaaggttcattggttccaatcacagctcataggtagagcaaagaaagggtggatggattgaaaagattagcctctgtctcggtggcaggttcccacctcgcaagcaattggaaacaaaacttttggggagttttattttgcattagggtgtgttttatgttaagcaaaacatactttagaaacaaatgaaaaaggcaattgaaaatcccagctatttcacctagatggaatagccaccctgagcagaactttgtgatgcttcattctgtggaattttgtgcttgctactgtatagtgcatgtggtgtaggttactctaactggttttgtcgacgtaaacatttaaagtgttatattttttataaaaatgtttatttttaatgatatgagaaaaattttgttaggccacaaaaacactgcactgtgaacattttagaaaaggtatgtcagactgggattaatgacagcatgattttcaatgactgtaaattgcgataaggaaatgtactgattgccaatacaccccaccctcattacatcatcaggacttgaagccaagggttaacccagcaagctacaaagagggtgtgtcacactgaaactcaatagttgagtttggctgttgttgcaggaaaatgattataactaaaagctctctgatagtgcagagacttaccagaagacacaaggaattgtactgaagagctattacaatccaaatattgccgtttcataaatgtaataagtaatactaattcacagagtattgtaaatggtggatgacaaaagaaaatctgctctgtggaaagaaagaactgtctctaccagggtcaagagcatgaacgcatcaatagaaagaactcggggaaacatcccatcaacaggactacacacttgtatatacattcttgagaacactgcaatgtgaaaatcacgtttgctatttataaacttgtccttagattaatgtgtctggacagattgtgggagtaagtgattcttctaagaattagatacttgtcactgcctatacctgcagctgaactgaatggtacttcgtatgttaatagttgttctgataaatcatgcaattaaagtaaagtgatgcaacatcttgtaaaaaaaaaaaaaaaaaaaa

SEQ ID NO: 242 - protein, 1390 aa, Homo sapiens
  REGION 1..1390: note = MET
MKAPAVLAPGILVLLFTLVQRSNGECKEALAKSEMNVNMKYQLPNFTAETPIQNVILHEHHIFLGATNYIYVLNEEDLQKVAEYKTGPVLEHPDCFPCQDCSSKANLSGGVWKDNINMALVVDTYYDDQLISCGSVNRGTCQRHVFPHNHTADIQSEVHCIFSPQIEEPSQCPDCVVSALGAKVLSSVKDRFINFFVGNTINSSYFPDHPLHSISVRRLKETKDGFMFLTDQSYIDVLPEFRDSYPIKYVHAFESNNFIYFLTVQRETLDAQTFHTRIIRFCSINSGLHSYMEMPLECILTEKRKKRSTKKEVFNILQAAYVSKPGAQLARQIGASLNDDILFGVFAQSKPDSAEPMDRSAMCAFPIKYVNDFFNKIVNKNNVRCLQHFYGPNHEHCFNRTLLRNSSGCEARRDEYRTEFTTALQRVDLFMGQFSEVLLTSISTFIKGDLTIANLGTSEGRFMQVVVSRSGPSTPHVNFLLDSHPVSPEVIVEHTLNQNGYTLVITGKKITKIPLNGLGCRHFQSCSQCLSAPPFVQCGWCHDKCVRSEECLSGTWTQQICLPAIYKVFPNSAPLEGGTRLTICGWDFGFRRNNKFDLKKTRVLLGNESCTLTLSESTMNTLKCTVGPAMNKHFNMSIIISNGHGTTQYSTFSYVDPVITSISPKYGPMAGGTLLTLTGNYLNSGNSRHISIGGKTCTLKSVSNSILECYTPAQTISTEFAVKLKIDLANRETSIFSYREDPIVYEIHPTKSFISGGSTITGVGKNLNSVSVPRMVINVHEAGRNFTVACQHRSNSEIICCTTPSLQQLNLQLPLKTKAFFMLDGILSKYFDLIYVHNPVFKPFEKPVMISMGNENVLEIKGNDIDPEAVKGEVLKVGNKSCENIHLHSEAVLCTVPNDLLKLNSELNIEWKQAISSTVLGKVIVQPDQNFTGLIAGVVSISTALLLLLGFFLWLKKRKQIKDLGSELVRYDARVHTPHLDRLVSARSVSPTTEMVSNESVDYRATFPEDQFPNSSQNGSCRQVQYPLTDMSPILTSGDSDISSPLLQNTVHIDLSALNPELVQAVQHVVIGPSSLIVHFNEVIGRGHFGCVYHGTLLDNDGKKIHCAVKSLNRITDIGEVSQFLTEGIIMKDFSHPNVLSLLGICLRSEGSPLVVLPYMKHGDLRNFIRNETHNPTVKDLIGFGLQVAKGMKYLASKKFVHRDLAARNCMLDEKFTVKVADFGLARDMYDKEYYSVHNKTGAKLPVKWMALESLQTQKFTTKSDVWSFGVLLWELMTRGAPPYPDVNTFDITVYLLQGRRLLQPEYCPDPLYEVMLKCWHPKAEMRPSFSELVSRISAIFSTFIGEHYVHVNATYVNVKCVAPYPSLLSSEDNADDEVDTRPASFWETS

SEQ ID NO: 243 - DNA, 4541 bp, Homo sapiens
  misc_feature 1..4541: note = RON
  source 1..4541: mol_type = genomic DNA
ggatcctctagggtcccagctcgcctcgatggagctcctcccgccgctgcctcagtccttcctgttgctgctgctgttgcctgccaagcccgcggcgggcgaggactggcagtgcccgcgcaccccctacgcggcctctcgcgactttgacgtgaagtacgtggtgcccagcttctccgccggaggcctggtacaggccatggtgacctacgagggcgacagaaatgagagtgctgtgtttgtagccatacgcaatcgcctgcatgtgcttgggcctgacctgaagtctgtccagagcctggccacgggccctgctggagaccctggctgccagacgtgtgcagcctgtggcccaggaccccacggccctcccggtgacacagacacaaaggtgctggtgctggatcccgcgctgcctgcgctggtcagttgtggctccagcctgcagggccgctgcttcctgcatgacctagagccccaagggacagccgtgcatctggcagcgccagcctgcctcttctcagcccaccataaccggcccgatgactgccccgactgtgtggccagcccattgggcacccgtgtaactgtggttgagcaaggccaggcctcctatttctacgtggcatcctcactggacgcagccgtggctggcagcttcagcccacgctcagtgtctatcaggcgtctcaaggctgacgcctcgggattcgcaccgggctttgtggcgttgtcagtgctgcccaagcatcttgtctcctacagtattgaatacgtgcacagcttccacacgggagccttcgtatacttcctgactgtacagccggccagcgtgacagatgatcctagtgccctgcacacacgcctggcacggcttagcgccactgagccagagttgggtgactatcgggagctggtcctcgactgcagatttgctccaaaacgcaggcgccggggggccccagaaggcggacagccctaccctgtgctgcaggtggcccactccgctccagtgggtgcccaacttgccactgagctgagcatcgccgagggccaggaagtactatttggggtctttgtgactggcaaggatggtggtcctggcgtgggccccaactctgtcgtctgtgccttccccattgacctgctggacacactaattgatgagggtgtggagcgctgttgtgaatccccagtccatccaggcctccggcgaggcctcgacttcttccagtcgcccagtttttgccccaacccgcctggcctggaagccctcagccccaacaccagctgccgccacttccctctgctggtcagtagcagcttctcacgtgtggacctattcaatgggctgttgggaccagtacaggtcactgcattgtatgtgacacgccttgacaacgtcacagtggcacacatgggcacaatggatgggcgtatcctgcaggtggagctggtcaggtcactaaactacttgctgtatgtgtccaacttctcactgggtgacagtgggcagcccgtgcagcgggatgtcagtcgtcttggggaccacctactctttgcctctggggaccaggttttccaggtacctatccgaggccctggctgccgccacttcctgacctgtgggcgttgcctaagggcatggcatttcatgggctgtggctggtgtgggaacatgtgcggccagcagaaggagtgtcctggctcctggcaacaggaccactgcccacctaagcttactgagttccacccccacagtggacctctaaggggcagtacaaggctgaccctgtgtggctccaacttctaccttcacccttctggtctggtgcctgagggaacccatcaggtcactgtgggccaaagtccctgccggccactgcccaaggacagctcaaaactcagaccagtgccccggaaagactttgtagaggagtttgagtgtgaactggagcccttgggcacccaggcagtggggcctaccaacgtcagcctcaccgtgactaacatgccaccgggcaagcacttccgggtagacggcacctccgtgctgagaggcttctctttcatggagccagtgctgatagcagtgcaacccctctttggcccacgggcaggaggcacctgtctcactcttgaaggccagagtctgtctgtaggcaccagccgggctgtgctggtcaatgggactgagtgtctgctagcacgggtcagtgaggggcagcttttatgtgccacaccccctggggccacggtggccagtgtcccccttagcctgcaggtggggggtgcccaggtacctggttcctggaccttccagtacagagaagaccctgtcgtgctaagcatcagccccaactgtggctacatcaactcccacatcaccatctgtggccagcatctaacttcagcatggcacttagtgctgtcattccatgacgggcttagggcagtggaaagcaggtgtgagaggcagcttccagagcagcagctgtgccgccttcctgaatatgtggtccgagacccccagggatgggtggcagggaatctgagtgcccgaggggatggagctgctggctttacactgcctggctttcgcttcctacccccaccccatccacccagtgccaacctagttccactgaagcctgaggagcatgccattaagtttgagtatattgggctgggcgctgtggctgactgtgtgggtatcaacgtgaccgtgggtggtgagagctgccagcacgagttccggggggacatggttgtctgccccctgcccccatccctgcagcttggccaggatggtgccccattgcaggtctgcgtagatggtgaatgtcatatcctgggtagagtggtgcggccagggccagatggggtcccacagagcacgctccttggtatcctgctgcctttgctgctgcttgtggctgcactggcgactgcactggtcttcagctactggtggcggaggaagcagctagttcttcctcccaacctgaatgacctggcatccctggaccagactgctggagccacacccctgcctattctgtactcgggctctgactacagaagtggccttgcactccctgccattgatggtctggattccaccacttgtgtccatggagcatccttctccgatagtgaagatgaatcctgtgtgccactgctgcggaaagagtccatccagctaagggacctggactctgcgctcttggctgaggtcaaggatgtgctgattccccatgagcgggtggtcacccacagtgaccgagtcattggcaaaggccactttggagttgtctaccacggagaatacatagaccaggcccagaatcgaatccaatgtgccatcaagtcactaagtcgcatcacagagatgcagcaggtggaggccttcctgcgagaggggctgctcatgcgtggcctgaaccacccgaatgtgctggctctcattggtatcatgttgccacctgagggcctgccccatgtgctgctgccctatatgtgccacggtgacctgctccagttcatccgctcacctcagcggaaccccaccgtgaaggacctcatcagctttggcctgcaggtagcccgcggcatggagtacctggcagagcagaagtttgtgcacagggacctggctgcgcggaactgcatgctggacgagtcattcacagtcaaggtggctgactttggtttggcccgcgacatcctggacagggagtactatagtgttcaacagcatcgccacgctcgcctacctgtgaagtggatggcgctggagagcctgcagacctatagatttaccaccaagtctgatgtgtggtcatttggtgtgctgctgtgggaactgctgacacggggtgccccaccataccgccacattgacccttttgaccttacccacttcctggcccagggtcggcgcctgccccagcctgagtattgccctgattctctgtaccaagtgatgcagcaatgctgggaggcagacccagcagtgcgacccaccttcagagtactagtgggggaggtggagcagatagtgtctgcactgcttggggaccattatgtgcagctgccagcaacctacatgaacttgggccccagcacctcgcatgagatgaatgtgcgtccagaacagccgcagttctcacccatgccagggaatgtacgccggccccggccactctcagagcctcctcggcccacttgacttagttcttgggctggacctgcttagctgccttgagctaaccccaaggctgcctctgggccatgccaggccagagcagtggccctccaccttgttcctgccctttaactttcagaggcaataggtaaatgggcccattaggtccctcactccacagagtgagccagtgagggcagtcctgcaacatgtatttatggagtgcctgctgtggaccctgtcttctgggcacagtggactcagcagtgaccacaccaacactgacccttgaaccaataaaggaacaaatgactattaaagcacaaaaaaaaaa

SEQ ID NO: 244 - protein, 1400 aa, Homo sapiens
  REGION 1..1400: note = RON
MELLPPLPQSFLLLLLLPAKPAAGEDWQCPRTPYAASRDFDVKYVVPSFSAGGLVQAMVTYEGDRNESAVFVAIRNRLHVLGPDLKSVQSLATGPAGDPGCQTCAACGPGPHGPPGDTDTKVLVLDPALPALVSCGSSLQGRCFLHDLEPQGTAVHLAAPACLFSAHHNRPDDCPDCVASPLGTRVTVVEQGQASYFYVASSLDAAVAGSFSPRSVSIRRLKADASGFAPGFVALSVLPKHLVSYSIEYVHSFHTGAFVYFLTVQPASVTDDPSALHTRLARLSATEPELGDYRELVLDCRFAPKRRRRGAPEGGQPYPVLQVAHSAPVGAQLATELSIAEGQEVLFGVFVTGKDGGPGVGPNSVVCAFPIDLLDTLIDEGVERCCESPVHPGLRRGLDFFQSPSFCPNPPGLEALSPNTSCRHFPLLVSSSFSRVDLFNGLLGPVQVTALYVTRLDNVTVAHMGTMDGRILQVELVRSLNYLLYVSNFSLGDSGQPVQRDVSRLGDHLLFASGDQVFQVPIRGPGCRHFLTCGRCLRAWHFMGCGWCGNMCGQQKECPGSWQQDHCPPKLTEFHPHSGPLRGSTRLTLCGSNFYLHPSGLVPEGTHQVTVGQSPCRPLPKDSSKLRPVPRKDFVEEFECELEPLGTQAVGPTNVSLTVTNMPPGKHFRVDGTSVLRGFSFMEPVLIAVQPLFGPRAGGTCLTLEGQSLSVGTSRAVLVNGTECLLARVSEGQLLCATPPGATVASVPLSLQVGGAQVPGSWTFQYREDPVVLSISPNCGYINSHITICGQHLTSAWHLVLSFHDGLRAVESRCERQLPEQQLCRLPEYVVRDPQGWVAGNLSARGDGAAGFTLPGFRFLPPPHPPSANLVPLKPEEHAIKFEYIGLGAVADCVGINVTVGGESCQHEFRGDMVVCPLPPSLQLGQDGAPLQVCVDGECHILGRVVRPGPDGVPQSTLLGILLPLLLLVAALATALVFSYWWRRKQLVLPPNLNDLASLDQTAGATPLPILYSGSDYRSGLALPAIDGLDSTTCVHGASFSDSEDESCVPLLRKESIQLRDLDSALLAEVKDVLIPHERVVTHSDRVIGKGHFGVVYHGEYIDQAQNRIQCAIKSLSRITEMQQVEAFLREGLLMRGLNHPNVLALIGIMLPPEGLPHVLLPYMCHGDLLQFIRSPQRNPTVKDLISFGLQVARGMEYLAEQKFVHRDLAARNCMLDESFTVKVADFGLARDILDREYYSVQQHRHARLPVKWMALESLQTYRFTTKSDVWSFGVLLWELLTRGAPPYRHIDPFDLTHFLAQGRRLPQPEYCPDSLYQVMQQCWEADPAVRPTFRVLVGEVEQIVSALLGDHYVQLPATYMNLGPSTSHEMNVRPEQPQFSPMPGNVRRPRPLSEPPRPT

SEQ ID NO: 245 - DNA, 4678 bp, Homo sapiens
  misc_feature 1..4678: note = TEK
  source 1..4678: mol_type = genomic DNA
tgaattgcgagatggatagggcttgagtgcccccagccctgctgataccaaatgcctttaagatacagcctttcccatcctaatctacaaaggaaacaggaaaaaggaacttaaaactccctgtgctcagacagaaatgagactgttacagcctgcttctgtgctgttccttcttgcctctaacttgtaaacaagacgtagtaggacgatgctaatggaaagtcacaaaccgctgggtttttgaaaggatccttgggacctcatgcacatttgtggaaactggatggagagatttggggaagcatggactctttagccagcttagttctctgtggagtcagcttgctcctttctggaactgtggaaggtgccatggacttgatcttgatcaattccctacctcttgtatctgatgctgaaacatctctcacctgcattgcctctgggtggcgcccccatgagcccatcaccataggaagggactttgaagccttaatgaaccagcaccaggatccgctggaagttactcaagatgtgaccagagaatgggctaaaaaagttgtttggaagagagaaaaggctagtaagatcaatggtgcttatttctgtgaagggcgagttcgaggagaggcaatcaggatacgaaccatgaagatgcgtcaacaagcttccttcctaccagctactttaactatgactgtggacaagggagataacgtgaacatatctttcaaaaaggtattgattaaagaagaagatgcagtgatttacaaaaatggttccttcatccattcagtgccccggcatgaagtacctgatattctagaagtacacctgcctcatgctcagccccaggatgctggagtgtactcggccaggtatataggaggaaacctcttcacctcggccttcaccaggctgatagtccggagatgtgaagcccagaagtggggacctgaatgcaaccatctctgtactgcttgtatgaacaatggtgtctgccatgaagatactggagaatgcatttgccctcctgggtttatgggaaggacgtgtgagaaggcttgtgaactgcacacgtttggcagaacttgtaaagaaaggtgcagtggacaagagggatgcaagtcttatgtgttctgtctccctgacccctatgggtgttcctgtgccacaggctggaagggtctgcagtgcaatgaagcatgccaccctggtttttacgggccagattgtaagcttaggtgcagctgcaacaatggggagatgtgtgatcgcttccaaggatgtctctgctctccaggatggcaggggctccagtgtgagagagaaggcataccgaggatgaccccaaagatagtggatttgccagatcatatagaagtaaacagtggtaaatttaatcccatttgcaaagcttctggctggccgctacctactaatgaagaaatgaccctggtgaagccggatgggacagtgctccatccaaaagactttaaccatacggatcatttctcagtagccatattcaccatccaccggatcctcccccctgactcaggagtttgggtctgcagtgtgaacacagtggctgggatggtggaaaagcccttcaacatttctgttaaagttcttccaaagcccctgaatgccccaaacgtgattgacactggacataactttgctgtcatcaacatcagctctgagccttactttggggatggaccaatcaaatccaagaagcttctatacaaacccgttaatcactatgaggcttggcaacatattcaagtgacaaatgagattgttacactcaactatttggaacctcggacagaatatgaactctgtgtgcaactggtccgtcgtggagagggtggggaagggcatcctggacctgtgagacgcttcacaacagcttctatcggactccctcctccaagaggtctaaatctcctgcctaaaagtcagaccactctaaatttgacctggcaaccaatatttccaagctcggaagatgacttttatgttgaagtggagagaaggtctgtgcaaaaaagtgatcagcagaatattaaagttccaggcaacttgacttcggtgctacttaacaacttacatcccagggagcagtacgtggtccgagctagagtcaacaccaaggcccagggggaatggagtgaagatctcactgcttggacccttagtgacattcttcctcctcaaccagaaaacatcaagatttccaacattacacactcctcagctgtgatttcttggacaatattggatggctattctatttcttctattactatccgttacaaggttcaaggcaagaatgaagaccagcacgttgatgtgaagataaagaatgccaccatcactcagtatcagctcaagggcctagagcctgaaacagcataccaggtggacatttttgcagagaacaacatagggtcaagcaacccagccttttctcatgaactggtgaccctcccagaatctcaagcaccagcggacctcggaggggggaagatgctgcttatagccatccttggctctgctggaatgacctgcctgactgtgctgttggcctttctgatcatattgcaattgaagagggcaaatgtgcaaaggagaatggcccaagccttccaaaacgtgagggaagaaccagctgtgcagttcaactcagggactctggccctaaacaggaaggtcaaaaacaacccagatcctacaatttatccagtgcttgactggaatgacatcaaatttcaagatgtgattggggagggcaattttggccaagttcttaaggcgcgcatcaagaaggatgggttacggatggatgctgccatcaaaagaatgaaagaatatgcctccaaagatgatcacagggactttgcaggagaactggaagttctttgtaaacttggacaccatccaaacatcatcaatctcttaggagcatgtgaacatcgaggctacttgtacctggccattgagtacgcgccccatggaaaccttctggacttccttcgcaagagccgtgtgctggagacggacccagcatttgccattgccaatagcaccgcgtccacactgtcctcccagcagctccttcacttcgctgccgacgtggcccggggcatggactacttgagccaaaaacagtttatccacagggatctggctgccagaaacattttagttggtgaaaactatgtggcaaaaatagcagattttggattgtcccgaggtcaagaggtgtatgtgaaaaagacaatgggaaggctcccagtgcgctggatggccatcgagtcactgaattacagtgtgtacacaaccaacagtgatgtatggtcctatggtgtgttactatgggagattgttagcttaggaggcacaccctactgcgggatgacttgtgcagaactctacgagaagctgccccagggctacagactggagaagcccctgaactgtgatgatgaggtgtatgatctaatgagacaatgctggcgggagaagccttatgagaggccatcatttgcccagatattggtgtccttaaacagaatgttagaggagcgaaagacctacgtgaataccacgctttatgagaagtttacttatgcaggaattgactgttctgctgaagaagcggcctaggacagaacatctgtataccctctgtttccctttcactggcatgggagacccttgacacctgctgagaaaacatgcctctgccaaaggatgtgatatataagtgtacatatgtgctgtacacctgggaccttcaccactgtagatcccatgcatggatctatgtagtatgctctgactctaataggactgtatatactgttttaagaatgggctgaaatcagaatgcctgtttgtggtttcatatgcaataatatatttttttaaaaatgtggacttcataggaaggcgtgagtacaattagtataatgcataactcattgttgtcctagatattttgatatttacctttatgttgaatgctattaaatgttttcctgtgtcaaagtaaaatattgttaataaacctaacaatgaccctgatagtacaggttaagtgagagaactatatgaattctaacaagtcataggttaatatttaagacactgaaaaatctaagtgatataaatcagattcttctctctcaattttatccctcacctgtagcagccagtcccgtttcatttagtcatgtgaccactctgtcttgtgtttccacagcctgcaagtcagtccaggatgctaacatctaaaaatagacttaaatctcattgcttacaagcctaagaatctttagagaagtatacataagtttaggataaaataatgggattttcttttcttttctctggtaatattgacttgtatattttaagaaataacagaaagcctgggtgacatttgggagacatgtgacatttatatattgaattaatatccctacatgtattgcacattgtaaaaagttttagttttgatgagttgtgagtttaccttgtatactgtaggcacactttgcactgatatatcatgagtgaataaatgtcttgcctactcacgtctcaaaaaaaaaaaaaaaaaaaaaaaaaaaaaaaaaaaaaaaaaaaaaaaaaaaaaaaaaaa

SEQ ID NO: 246 - protein, 1124 aa, Homo sapiens
  REGION 1..1124: note = TEK
MDSLASLVLCGVSLLLSGTVEGAMDLILINSLPLVSDAETSLTCIASGWRPHEPITIGRDFEALMNQHQDPLEVTQDVTREWAKKVVWKREKASKINGAYFCEGRVRGEAIRIRTMKMRQQASFLPATLTMTVDKGDNVNISFKKVLIKEEDAVIYKNGSFIHSVPRHEVPDILEVHLPHAQPQDAGVYSARYIGGNLFTSAFTRLIVRRCEAQKWGPECNHLCTACMNNGVCHEDTGECICPPGFMGRTCEKACELHTFGRTCKERCSGQEGCKSYVFCLPDPYGCSCATGWKGLQCNEACHPGFYGPDCKLRCSCNNGEMCDRFQGCLCSPGWQGLQCEREGIPRMTPKIVDLPDHIEVNSGKFNPICKASGWPLPTNEEMTLVKPDGTVLHPKDFNHTDHFSVAIFTIHRILPPDSGVWVCSVNTVAGMVEKPFNISVKVLPKPLNAPNVIDTGHNFAVINISSEPYFGDGPIKSKKLLYKPVNHYEAWQHIQVTNEIVTLNYLEPRTEYELCVQLVRRGEGGEGHPGPVRRFTTASIGLPPPRGLNLLPKSQTTLNLTWQPIFPSSEDDFYVEVERRSVQKSDQQNIKVPGNLTSVLLNNLHPREQYVVRARVNTKAQGEWSEDLTAWTLSDILPPQPENIKISNITHSSAVISWTILDGYSISSITIRYKVQGKNEDQHVDVKIKNATITQYQLKGLEPETAYQVDIFAENNIGSSNPAFSHELVTLPESQAPADLGGGKMLLIAILGSAGMTCLTVLLAFLIILQLKRANVQRRMAQAFQNVREEPAVQFNSGTLALNRKVKNNPDPTIYPVLDWNDIKFQDVIGEGNFGQVLKARIKKDGLRMDAAIKRMKEYASKDDHRDFAGELEVLCKLGHHPNIINLLGACEHRGYLYLAIEYAPHGNLLDFLRKSRVLETDPAFAIANSTASTLSSQQLLHFAADVARGMDYLSQKQFIHRDLAARNILVGENYVAKIADFGLSRGQEVYVKKTMGRLPVRWMAIESLNYSVYTTNSDVWSYGVLLWEIVSLGGTPYCGMTCAELYEKLPQGYRLEKPLNCDDEVYDLMRQCWREKPYERPSFAQILVSLNRMLEERKTYVNTTLYEKFTYAGIDCSAEEAA

SEQ ID NO: 247 - DNA, 3960 bp, Homo sapiens
  misc_feature 1..3960: note = Tie-1
  source 1..3960: mol_type = genomic DNA
cacaggctgagcagtcaggcccacagcatctgaccccaggcccagctcgtcctggctggcctgggtcggcctctggagtatggtctggcgggtgccccctttcttgctccccatcctcttcttggcttctcatgtgggcgcggcggtggacctgacgctgctggccaacctgcggctcacggacccccagcgcttcttcctgacttgcgtgtctggggaggccggggcggggaggggctcggacgcctggggcccgcccctgctgctggagaaggacgaccgtatcgtgcgcaccccgcccgggccacccctgcgcctggcgcgcaacggttcgcaccaggtcacgcttcgcggcttctccaagccctcggacctcgtgggcgtcttctcctgcgtgggcggtgctggggcgcggcgcacgcgcgtcatctacgtgcacaacagccctggagcccacctgcttccagacaaggtcacacacactgtgaacaaaggtgacaccgctgtactttctgcacgtgtgcacaaggagaagcagacagacgtgatctggaagagcaacggatcctacttctacaccctggactggcatgaagcccaggatgggcggttcctgctgcagctcccaaatgtgcagccaccatcgagcggcatctacagtgccacttacctggaagccagccccctgggcagcgccttctttcggctcatcgtgcggggttgtggggctgggcgctgggggccaggctgtaccaaggagtgcccaggttgcctacatggaggtgtctgccacgaccatgacggcgaatgtgtatgcccccctggcttcactggcacccgctgtgaacaggcctgcagagagggccgttttgggcagagctgccaggagcagtgcccaggcatatcaggctgccggggcctcaccttctgcctcccagacccctatggctgctcttgtggatctggctggagaggaagccagtgccaagaagcttgtgcccctggtcattttggggctgattgccgactccagtgccagtgtcagaatggtggcacttgtgaccggttcagtggttgtgtctgcccctctgggtggcatggagtgcactgtgagaagtcagaccggatcccccagatcctcaacatggcctcagaactggagttcaacttagagacgatgccccggatcaactgtgcagctgcagggaaccccttccccgtgcggggcagcatagagctacgcaagccagacggcactgtgctcctgtccaccaaggccattgtggagccagagaagaccacagctgagttcgaggtgccccgcttggttcttgcggacagtgggttctgggagtgccgtgtgtccacatctggcggccaagacagccggcgcttcaaggtcaatgtgaaagtgccccccgtgcccctggctgcacctcggctcctgaccaagcagagccgccagcttgtggtctccccgctggtctcgttctctggggatggacccatctccactgtccgcctgcactaccggccccaggacagtaccatggactggtcgaccattgtggtggaccccagtgagaacgtgacgttaatgaacctgaggccaaagacaggatacagtgttcgtgtgcagctgagccggccaggggaaggaggagagggggcctgggggcctcccaccctcatgaccacagactgtcctgagcctttgttgcagccgtggttggagggctggcatgtggaaggcactgaccggctgcgagtgagctggtccttgcccttggtgcccgggccactggtgggcgacggtttcctgctgcgcctgtgggacgggacacgggggcaggagcggcgggagaacgtctcatccccccaggcccgcactgccctcctgacgggactcacgcctggcacccactaccagctggatgtgcagctctaccactgcaccctcctgggcccggcctcgccccctgcacacgtgcttctgccccccagtgggcctccagccccccgacacctccacgcccaggccctctcagactccgagatccagctgacatggaagcacccggaggctctgcctgggccaatatccaagtacgttgtggaggtgcaggtggctgggggtgcaggagacccactgtggatagacgtggacaggcctgaggagacaagcaccatcatccgtggcctcaacgccagcacgcgctacctcttccgcatgcgggccagcattcaggggctcggggactggagcaacacagtagaagagtccaccctgggcaacgggctgcaggctgagggcccagtccaagagagccgggcagctgaagagggcctggatcagcagctgatcctggcggtggtgggctccgtgtctgccacctgcctcaccatcctggccgcccttttaaccctggtgtgcatccgcagaagctgcctgcatcggagacgcaccttcacctaccagtcaggctcgggcgaggagaccatcctgcagttcagctcagggaccttgacacttacccggcggccaaaactgcagcccgagcccctgagctacccagtgctagagtgggaggacatcacctttgaggacctcatcggggaggggaacttcggccaggtcatccgggccatgatcaagaaggacgggctgaagatgaacgcagccatcaaaatgctgaaagagtatgcctctgaaaatgaccatcgtgactttgcgggagaactggaagttctgtgcaaattggggcatcaccccaacatcatcaacctcctgggggcctgtaagaaccgaggttacttgtatatcgctattgaatatgccccctacgggaacctgctagattttctgcggaaaagccgggtcctagagactgacccagcttttgctcgagagcatgggacagcctctacccttagctcccggcagctgctgcgtttcgccagtgatgcggccaatggcatgcagtacctgagtgagaagcagttcatccacagggacctggctgcccggaatgtgctggtcggagagaacctagcctccaagattgcagacttcggcctttctcggggagaggaggtttatgtgaagaagacgatggggcgtctccctgtgcgctggatggccattgagtccctgaactacagtgtctataccaccaagagtgatgtctggtcctttggagtccttctttgggagatagtgagccttggaggtacaccctactgtggcatgacctgtgccgagctctatgaaaagctgccccagggctaccgcatggagcagcctcgaaactgtgacgatgaagtgtacgagctgatgcgtcagtgctggcgggaccgtccctatgagcgacccccctttgcccagattgcgctacagctaggccgcatgctggaagccaggaaggcctatgtgaacatgtcgctgtttgagaacttcacttacgcgggcattgatgccacagctgaggaggcctgagctgccatccagccagaacgtggctctgctggccggagcaaactctgctgtctaacctgtgaccagtctgacccttacagcctctgacttaagctgcctcaaggaatttttttaacttaagggagaaaaaaagggatctggggatggggtgggcttaggggaactgggttcccatgctttgtaggtgtctcatagctatcctgggcatccttctttctagttcagctgccccacaggtgtgtttcccatcccactgctcccccaacacaaacccccactccagctccttcgcttaagccagcactcacaccactaacatgccctgttcagctactcccactcccggcctgtcattcagaaaaaaataaatgttctaataagctccaaaaaaaaaaaaaaaaaaaaaaaaaaaaaaaaaaaaaaaaaaaaaaaaaaaaaaaaaaaaaaaaaaaaaaaaaaaaaaa

SEQ ID NO: 248 - protein, 1138 aa, Homo sapiens
  REGION 1..1138: note = Tie-1
MVWRVPPFLLPILFLASHVGAAVDLTLLANLRLTDPQRFFLTCVSGEAGAGRGSDAWGPPLLLEKDDRIVRTPPGPPLRLARNGSHQVTLRGFSKPSDLVGVFSCVGGAGARRTRVIYVHNSPGAHLLPDKVTHTVNKGDTAVLSARVHKEKQTDVIWKSNGSYFYTLDWHEAQDGRFLLQLPNVQPPSSGIYSATYLEASPLGSAFFRLIVRGCGAGRWGPGCTKECPGCLHGGVCHDHDGECVCPPGFTGTRCEQACREGRFGQSCQEQCPGISGCRGLTFCLPDPYGCSCGSGWRGSQCQEACAPGHFGADCRLQCQCQNGGTCDRFSGCVCPSGWHGVHCEKSDRIPQILNMASELEFNLETMPRINCAAAGNPFPVRGSIELRKPDGTVLLSTKAIVEPEKTTAEFEVPRLVLADSGFWECRVSTSGGQDSRRFKVNVKVPPVPLAAPRLLTKQSRQLVVSPLVSFSGDGPISTVRLHYRPQDSTMDWSTIVVDPSENVTLMNLRPKTGYSVRVQLSRPGEGGEGAWGPPTLMTTDCPEPLLQPWLEGWHVEGTDRLRVSWSLPLVPGPLVGDGFLLRLWDGTRGQERRENVSSPQARTALLTGLTPGTHYQLDVQLYHCTLLGPASPPAHVLLPPSGPPAPRHLHAQALSDSEIQLTWKHPEALPGPISKYVVEVQVAGGAGDPLWIDVDRPEETSTIIRGLNASTRYLFRMRASIQGLGDWSNTVEESTLGNGLQAEGPVQESRAAEEGLDQQLILAVVGSVSATCLTILAALLTLVCIRRSCLHRRRTFTYQSGSGEETILQFSSGTLTLTRRPKLQPEPLSYPVLEWEDITFEDLIGEGNFGQVIRAMIKKDGLKMNAAIKMLKEYASENDHRDFAGELEVLCKLGHHPNIINLLGACKNRGYLYIAIEYAPYGNLLDFLRKSRVLETDPAFAREHGTASTLSSRQLLRFASDAANGMQYLSEKQFIHRDLAARNVLVGENLASKIADFGLSRGEEVYVKKTMGRLPVRWMAIESLNYSVYTTKSDVWSFGVLLWEIVSLGGTPYCGMTCAELYEKLPQGYRMEQPRNCDDEVYELMRQCWRDRPYERPPFAQIALQLGRMLEARKAYVNMSLFENFTYAGIDATAEEA

SEQ ID NO: 249 - DNA, 2236 bp, Homo sapiens
  misc_feature 1..2236: note = TNFR1
  source 1..2236: mol_type = genomic DNA
gctgttgcaacactgcctcactcttcccctcccaccttctctcccctcctctctgctttaattttctcagaattctctggactgaggctccagttctggcctttggggttcaagatcactgggaccaggccgtgatctctatgcccgagtctcaaccctcaactgtcaccccaaggcacttgggacgtcctggacagaccgagtcccgggaagccccagcactgccgctgccacactgccctgagcccaaatgggggagtgagaggccatagctgtctggcatgggcctctccaccgtgcctgacctgctgctgccactggtgctcctggagctgttggtgggaatatacccctcaggggttattggactggtccctcacctaggggacagggagaagagagatagtgtgtgtccccaaggaaaatatatccaccctcaaaataattcgatttgctgtaccaagtgccacaaaggaacctacttgtacaatgactgtccaggcccggggcaggatacggactgcagggagtgtgagagcggctccttcaccgcttcagaaaaccacctcagacactgcctcagctgctccaaatgccgaaaggaaatgggtcaggtggagatctcttcttgcacagtggaccgggacaccgtgtgtggctgcaggaagaaccagtaccggcattattggagtgaaaaccttttccagtgcttcaattgcagcctctgcctcaatgggaccgtgcacctctcctgccaggagaaacagaacaccgtgtgcacctgccatgcaggtttctttctaagagaaaacgagtgtgtctcctgtagtaactgtaagaaaagcctggagtgcacgaagttgtgcctaccccagattgagaatgttaagggcactgaggactcaggcaccacagtgctgttgcccctggtcattttctttggtctttgccttttatccctcctcttcattggtttaatgtatcgctaccaacggtggaagtccaagctctactccattgtttgtgggaaatcgacacctgaaaaagagggggagcttgaaggaactactactaagcccctggccccaaacccaagcttcagtcccactccaggcttcacccccaccctgggcttcagtcccgtgcccagttccaccttcacctccagctccacctatacccccggtgactgtcccaactttgcggctccccgcagagaggtggcaccaccctatcagggggctgaccccatccttgcgacagccctcgcctccgaccccatccccaacccccttcagaagtgggaggacagcgcccacaagccacagagcctagacactgatgaccccgcgacgctgtacgccgtggtggagaacgtgcccccgttgcgctggaaggaattcgtgcggcgcctagggctgagcgaccacgagatcgatcggctggagctgcagaacgggcgctgcctgcgcgaggcgcaatacagcatgctggcgacctggaggcggcgcacgccgcggcgcgaggccacgctggagctgctgggacgcgtgctccgcgacatggacctgctgggctgcctggaggacatcgaggaggcgctttgcggccccgccgccctcccgcccgcgcccagtcttctcagatgaggctgcgcccctgcgggcagctctaaggaccgtcctgcgagatcgccttccaaccccacttttttctggaaaggaggggtcctgcaggggcaagcaggagctagcagccgcctacttggtgctaacccctcgatgtacatagcttttctcagctgcctgcgcgccgccgacagtcagcgctgtgcgcgcggagagaggtgcgccgtgggctcaagagcctgagtgggtggtttgcgaggatgagggacgctatgcctcatgcccgttttgggtgtcctcaccagcaaggctgctcgggggcccctggttcgtccctgagcctttttcacagtgcataagcagttttttttgtttttgttttgttttgttttgtttttaaatcaatcatgttacactaatagaaacttggcactcctgtgccctctgcctggacaagcacatagcaagctgaactgtcctaaggcaggggcgagcacggaacaatggggccttcagctggagctgtggacttttgtacatacactaaaattctgaagttaaagctctgctcttggaaaaaaaaaaaaaaaaaaaaaaaaaaaaaaaaa

SEQ ID NO: 250 - protein, 455 aa, Homo sapiens
  REGION 1..455: note = TNFR1
MGLSTVPDLLLPLVLLELLVGIYPSGVIGLVPHLGDREKRDSVCPQGKYIHPQNNSICCTKCHKGTYLYNDCPGPGQDTDCRECESGSFTASENHLRHCLSCSKCRKEMGQVEISSCTVDRDTVCGCRKNQYRHYWSENLFQCFNCSLCLNGTVHLSCQEKQNTVCTCHAGFFLRENECVSCSNCKKSLECTKLCLPQIENVKGTEDSGTTVLLPLVIFFGLCLLSLLFIGLMYRYQRWKSKLYSIVCGKSTPEKEGELEGTTTKPLAPNPSFSPTPGFTPTLGFSPVPSSTFTSSSTYTPGDCPNFAAPRREVAPPYQGADPILATALASDPIPNPLQKWEDSAHKPQSLDTDDPATLYAVVENVPPLRWKEFVRRLGLSDHEIDRLELQNGRCLREAQYSMLATWRRRTPRREATLELLGRVLRDMDLLGCLEDIEEALCGPAALPPAPSLLR

SEQ ID NO: 251 - DNA, 3682 bp, Homo sapiens
  misc_feature 1..3682: note = TNFR2
  source 1..3682: mol_type = genomic DNA
gcgagcgcagcggagcctggagagaaggcgctgggctgcgagggcgcgagggcgcgagggcagggggcaaccggaccccgcccgcacccatggcgcccgtcgccgtctgggccgcgctggccgtcggactggagctctgggctgcggcgcacgccttgcccgcccaggtggcatttacaccctacgccccggagcccgggagcacatgccggctcagagaatactatgaccagacagctcagatgtgctgcagcaaatgctcgccgggccaacatgcaaaagtcttctgtaccaagacctcggacaccgtgtgtgactcctgtgaggacagcacatacacccagctctggaactgggttcccgagtgcttgagctgtggctcccgctgtagctctgaccaggtggaaactcaagcctgcactcgggaacagaaccgcatctgcacctgcaggcccggctggtactgcgcgctgagcaagcaggaggggtgccggctgtgcgcgccgctgcgcaagtgccgcccgggcttcggcgtggccagaccaggaactgaaacatcagacgtggtgtgcaagccctgtgccccggggacgttctccaacacgacttcatccacggatatttgcaggccccaccagatctgtaacgtggtggccatccctgggaatgcaagcatggatgcagtctgcacgtccacgtcccccacccggagtatggccccaggggcagtacacttaccccagccagtgtccacacgatcccaacacacgcagccaactccagaacccagcactgctccaagcacctccttcctgctcccaatgggccccagccccccagctgaagggagcactggcgacttcgctcttccagttggactgattgtgggtgtgacagccttgggtctactaataataggagtggtgaactgtgtcatcatgacccaggtgaaaaagaagcccttgtgcctgcagagagaagccaaggtgcctcacttgcctgccgataaggcccggggtacacagggccccgagcagcagcacctgctgatcacagcgccgagctccagcagcagctccctggagagctcggccagtgcgttggacagaagggcgcccactcggaaccagccacaggcaccaggcgtggaggccagtggggccggggaggcccgggccagcaccgggagctcagattcttcccctggtggccatgggacccaggtcaatgtcacctgcatcgtgaacgtctgtagcagctctgaccacagctcacagtgctcctcccaagccagctccacaatgggagacacagattccagcccctcggagtccccgaaggacgagcaggtccccttctccaaggaggaatgtgcctttcggtcacagctggagacgccagagaccctgctggggagcaccgaagagaagcccctgccccttggagtgcctgatgctgggatgaagcccagttaaccaggccggtgtgggctgtgtcgtagccaaggtgggctgagccctggcaggatgaccctgcgaaggggccctggtccttccaggcccccaccactaggactctgaggctctttctgggccaagttcctctagtgccctccacagccgcagcctccctctgacctgcaggccaagagcagaggcagcgagttgtggaaagcctctgctgccatggcgtgtccctctcggaaggctggctgggcatggacgttcggggcatgctggggcaagtccctgactctctgtgacctgccccgcccagctgcacctgccagcctggcttctggagcccttgggttttttgtttgtttgtttgtttgtttgtttgtttctccccctgggctctgccccagctctggcttccagaaaaccccagcatccttttctgcagaggggctttctggagaggagggatgctgcctgagtcacccatgaagacaggacagtgcttcagcctgaggctgagactgcgggatggtcctggggctctgtgcagggaggaggtggcagccctgtagggaacggggtccttcaagttagctcaggaggcttggaaagcatcacctcaggccaggtgcagtggctcacgcctatgatcccagcactttgggaggctgaggcgggtggatcacctgaggttaggagttcgagaccagcctggccaacatggtaaaaccccatctctactaaaaatacagaaattagccgggcgtggtggcgggcacctatagtcccagctactcagaagcctgaggctgggaaatcgtttgaacccgggaagcggaggttgcagggagccgagatcacgccactgcactccagcctgggcgacagagcgagagtctgtctcaaaagaaaaaaaaaagcaccgcctccaaatgccaacttgtccttttgtaccatggtgtgaaagtcagatgcccagagggcccaggcaggccaccatattcagtgctgtggcctgggcaagataacgcacttctaactagaaatctgccaattttttaaaaaagtaagtaccactcaggccaacaagccaacgacaaagccaaactctgccagccacatccaaccccccacctgccatttgcaccctccgccttcactccggtgtgcctgcagccccgcgcctccttccttgctgtcctaggccacaccatctcctttcagggaatttcaggaactagagatgactgagtcctcgtagccatctctctactcctacctcagcctagaccctcctcctcccccagaggggtgggttcctcttccccactccccaccttcaattcctgggccccaaacgggctgccctgccactttggtacatggccagtgtgatcccaagtgccagtcttgtgtctgcgtctgtgttgcgtgtcgtgggtgtgtgtagccaaggtcggtaagttgaatggcctgccttgaagccactgaagctgggattcctccccattagagtcagccttccccctcccagggccagggccctgcagaggggaaaccagtgtagccttgcccggattctgggaggaagcaggttgaggggctcctggaaaggctcagtctcaggagcatggggataaaggagaaggcatgaaattgtctagcagagcaggggcagggtgataaattgttgataaattccactggacttgagcttggcagctgaactattggagggtgggagagcccagccattaccatggagacaagaagggttttccaccctggaatcaagatgtcagactggctggctgcagtgacgtgcacctgtactcaggaggctgaggggaggatcactggagcccaggagtttgaggctgcagcgagctatgatcgcgccactacactccagcctgagcaacagagtgagaccctgtctcttaaagaaaaaaaaagtcagactgctgggactggccaggtttctgcccacattggacccacatgaggacatgatggagcgcacctgccccctggtggacagtcctgggagaacctcaggcttccttggcatcacagggcagagccgggaagcgatgaatttggagactctgtggggccttggttcccttgtgtgtgtgtgttgatcccaagacaatgaaagtttgcactgtatgctggacggcattcctgcttatcaataaacctgtttgttttaaaaaaaa

SEQ ID NO: 252 - protein, 461 aa, Homo sapiens
  REGION 1..461: note = TNFR2
MAPVAVWAALAVGLELWAAAHALPAQVAFTPYAPEPGSTCRLREYYDQTAQMCCSKCSPGQHAKVFCTKTSDTVCDSCEDSTYTQLWNWVPECLSCGSRCSSDQVETQACTREQNRICTCRPGWYCALSKQEGCRLCAPLRKCRPGFGVARPGTETSDVVCKPCAPGTFSNTTSSTDICRPHQICNVVAIPGNASMDAVCTSTSPTRSMAPGAVHLPQPVSTRSQHTQPTPEPSTAPSTSFLLPMGPSPPAEGSTGDFALPVGLIVGVTALGLLIIGVVNCVIMTQVKKKPLCLQREAKVPHLPADKARGTQGPEQQHLLITAPSSSSSSLESSASALDRRAPTRNQPQAPGVEASGAGEARASTGSSDSSPGGHGTQVNVTCIVNVCSSSDHSSQCSSQASSTMGDTDSSPSESPKDEQVPFSKEECAFRSQLETPETLLGSTEEKPLPLGVPDAGMKPS

SEQ ID NO: 253 - DNA, 5777 bp, Homo sapiens
  misc_feature 1..5777: note = VEGFR1
  source 1..5777: mol_type = genomic DNA
gcggacactcctctcggctcctccccggcagcggcggcggctcggagcgggctccggggctcgggtgcagcggccagcgggcctggcggcgaggattacccggggaagtggttgtctcctggctggagccgcgagacgggcgctcagggcgcggggccggcggcggcgaacgagaggacggactctggcggccgggtcgttggccgggggagcgcgggcaccgggcgagcaggccgcgtcgcgctcaccatggtcagctactgggacaccggggtcctgctgtgcgcgctgctcagctgtctgcttctcacaggatctagttcaggttcaaaattaaaagatcctgaactgagtttaaaaggcacccagcacatcatgcaagcaggccagacactgcatctccaatgcaggggggaagcagcccataaatggtctttgcctgaaatggtgagtaaggaaagcgaaaggctgagcataactaaatctgcctgtggaagaaatggcaaacaattctgcagtactttaaccttgaacacagctcaagcaaaccacactggcttctacagctgcaaatatctagctgtacctacttcaaagaagaaggaaacagaatctgcaatctatatatttattagtgatacaggtagacctttcgtagagatgtacagtgaaatccccgaaattatacacatgactgaaggaagggagctcgtcattccctgccgggttacgtcacctaacatcactgttactttaaaaaagtttccacttgacactttgatccctgatggaaaacgcataatctgggacagtagaaagggcttcatcatatcaaatgcaacgtacaaagaaatagggcttctgacctgtgaagcaacagtcaatgggcatttgtataagacaaactatctcacacatcgacaaaccaatacaatcatagatgtccaaataagcacaccacgcccagtcaaattacttagaggccatactcttgtcctcaattgtactgctaccactcccttgaacacgagagttcaaatgacctggagttaccctgatgaaaaaaataagagagcttccgtaaggcgacgaattgaccaaagcaattcccatgccaacatattctacagtgttcttactattgacaaaatgcagaacaaagacaaaggactttatacttgtcgtgtaaggagtggaccatcattcaaatctgttaacacctcagtgcatatatatgataaagcattcatcactgtgaaacatcgaaaacagcaggtgcttgaaaccgtagctggcaagcggtcttaccggctctctatgaaagtgaaggcatttccctcgccggaagttgtatggttaaaagatgggttacctgcgactgagaaatctgctcgctatttgactcgtggctactcgttaattatcaaggacgtaactgaagaggatgcagggaattatacaatcttgctgagcataaaacagtcaaatgtgtttaaaaacctcactgccactctaattgtcaatgtgaaaccccagatttacgaaaaggccgtgtcatcgtttccagacccggctctctacccactgggcagcagacaaatcctgacttgtaccgcatatggtatccctcaacctacaatcaagtggttctggcacccctgtaaccataatcattccgaagcaaggtgtgacttttgttccaataatgaagagtcctttatcctggatgctgacagcaacatgggaaacagaattgagagcatcactcagcgcatggcaataatagaaggaaagaataagatggctagcaccttggttgtggctgactctagaatttctggaatctacatttgcatagcttccaataaagttgggactgtgggaagaaacataagcttttatatcacagatgtgccaaatgggtttcatgttaacttggaaaaaatgccgacggaaggagaggacctgaaactgtcttgcacagttaacaagttcttatacagagacgttacttggattttactgcggacagttaataacagaacaatgcactacagtattagcaagcaaaaaatggccatcactaaggagcactccatcactcttaatcttaccatcatgaatgtttccctgcaagattcaggcacctatgcctgcagagccaggaatgtatacacaggggaagaaatcctccagaagaaagaaattacaatcagagatcaggaagcaccatacctcctgcgaaacctcagtgatcacacagtggccatcagcagttccaccactttagactgtcatgctaatggtgtccccgagcctcagatcacttggtttaaaaacaaccacaaaatacaacaagagcctggaattattttaggaccaggaagcagcacgctgtttattgaaagagtcacagaagaggatgaaggtgtctatcactgcaaagccaccaaccagaagggctctgtggaaagttcagcatacctcactgttcaaggaacctcggacaagtctaatctggagctgatcactctaacatgcacctgtgtggctgcgactctcttctggctcctattaaccctccttatccgaaaaatgaaaaggtcttcttctgaaataaagactgactacctatcaattataatggacccagatgaagttcctttggatgagcagtgtgagcggctcccttatgatgccagcaagtgggagtttgcccgggagagacttaaactgggcaaatcacttggaagaggggcttttggaaaagtggttcaagcatcagcatttggcattaagaaatcacctacgtgccggactgtggctgtgaaaatgctgaaagagggggccacggccagcgagtacaaagctctgatgactgagctaaaaatcttgacccacattggccaccatctgaacgtggttaacctgctgggagcctgcaccaagcaaggagggcctctgatggtgattgttgaatactgcaaatatggaaatctctccaactacctcaagagcaaacgtgacttattttttctcaacaaggatgcagcactacacatggagcctaagaaagaaaaaatggagccaggcctggaacaaggcaagaaaccaagactagatagcgtcaccagcagcgaaagctttgcgagctccggctttcaggaagataaaagtctgagtgatgttgaggaagaggaggattctgacggtttctacaaggagcccatcactatggaagatctgatttcttacagttttcaagtggccagaggcatggagttcctgtcttccagaaagtgcattcatcgggacctggcagcgagaaacattcttttatctgagaacaacgtggtgaagatttgtgattttggccttgcccgggatatttataagaaccccgattatgtgagaaaaggagatactcgacttcctctgaaatggatggctcccgaatctatctttgacaaaatctacagcaccaagagcgacgtgtggtcttacggagtattgctgtgggaaatcttctccttaggtgggtctccatacccaggagtacaaatggatgaggacttttgcagtcgcctgagggaaggcatgaggatgagagctcctgagtactctactcctgaaatctatcagatcatgctggactgctggcacagagacccaaaagaaaggccaagatttgcagaacttgtggaaaaactaggtgatttgcttcaagcaaatgtacaacaggatggtaaagactacatcccaatcaatgccatactgacaggaaatagtgggtttacatactcaactcctgccttctctgaggacttcttcaaggaaagtatttcagctccgaagtttaattcaggaagctctgatgatgtcagatatgtaaatgctttcaagttcatgagcctggaaagaatcaaaacctttgaagaacttttaccgaatgccacctccatgtttgatgactaccagggcgacagcagcactctgttggcctctcccatgctgaagcgcttcacctggactgacagcaaacccaaggcctcgctcaagattgacttgagagtaaccagtaaaagtaaggagtcggggctgtctgatgtcagcaggcccagtttctgccattccagctgtgggcacgtcagcgaaggcaagcgcaggttcacctacgaccacgctgagctggaaaggaaaatcgcgtgctgctccccgcccccagactacaactcggtggtcctgtactccaccccacccatctagagtttgacacgaagccttatttctagaagcacatgtgtatttatacccccaggaaactagcttttgccagtattatgcatatataagtttacacctttatctttccatgggagccagctgctttttgtgatttttttaatagtgctttttttttttgactaacaagaatgtaactccagatagagaaatagtgacaagtgaagaacactactgctaaatcctcatgttactcagtgttagagaaatccttcctaaacccaatgacttccctgctccaacccccgccacctcagggcacgcaggaccagtttgattgaggagctgcactgatcacccaatgcatcacgtaccccactgggccagccctgcagcccaaaacccagggcaacaagcccgttagccccaggggatcactggctggcctgagcaacatctcgggagtcctctagcaggcctaagacatgtgaggaggaaaaggaaaaaaagcaaaaagcaagggagaaaagagaaaccgggagaaggcatgagaaagaatttgagacgcaccatgtgggcacggagggggacggggctcagcaatgccatttcagtggcttcccagctctgacccttctacatttgagggcccagccaggagcagatggacagcgatgaggggacattttctggattctgggaggcaagaaaaggacaaatatcttttttggaactaaagcaaattttagacctttacctatggaagtggttctatgtccattctcattcgtggcatgttttgatttgtagcactgagggtggcactcaactctgagcccatacttttggctcctctagtaagatgcactgaaaacttagccagagttaggttgtctccaggccatgatggccttacactgaaaatgtcacattctattttgggtattaatatatagtccagacacttaactcaatttcttggtattattctgttttgcacagttagttgtgaaagaaagctgagaagaatgaaaatgcagtcctgaggagagttttctccatatcaaaacgagggctgatggaggaaaaaggtcaataaggtcaagggaagaccccgtctctataccaaccaaaccaattcaccaacacagttgggacccaaaacacaggaagtcagtcacgtttccttttcatttaatggggattccactatctcacactaatctgaaaggatgtggaagagcattagctggcgcatattaagcactttaagctccttgagtaaaaaggtggtatgtaatttatgcaaggtatttctccagttgggactcaggatattagttaatgagccatcactagaagaaaagcccattttcaactgctttgaaacttgcctggggtctgagcatgatgggaatagggagacagggtaggaaagggcgcctactcttcagggtctaaagatcaagtgggccttggatcgctaagctggctctgtttgatgctatttatgcaagttagggtctatgtattta

SEQ ID NO: 254 - protein, 1338 aa, Homo sapiens
  REGION 1..1338: note = VEGFR1
MVSYWDTGVLLCALLSCLLLTGSSSGSKLKDPELSLKGTQHIMQAGQTLHLQCRGEAAHKWSLPEMVSKESERLSITKSACGRNGKQFCSTLTLNTAQANHTGFYSCKYLAVPTSKKKETESAIYIFISDTGRPFVEMYSEIPEIIHMTEGRELVIPCRVTSPNITVTLKKFPLDTLIPDGKRIIWDSRKGFIISNATYKEIGLLTCEATVNGHLYKTNYLTHRQTNTIIDVQISTPRPVKLLRGHTLVLNCTATTPLNTRVQMTWSYPDEKNKRASVRRRIDQSNSHANIFYSVLTIDKMQNKDKGLYTCRVRSGPSFKSVNTSVHIYDKAFITVKHRKQQVLETVAGKRSYRLSMKVKAFPSPEVVWLKDGLPATEKSARYLTRGYSLIIKDVTEEDAGNYTILLSIKQSNVFKNLTATLIVNVKPQIYEKAVSSFPDPALYPLGSRQILTCTAYGIPQPTIKWFWHPCNHNHSEARCDFCSNNEESFILDADSNMGNRIESITQRMAIIEGKNKMASTLVVADSRISGIYICIASNKVGTVGRNISFYITDVPNGFHVNLEKMPTEGEDLKLSCTVNKFLYRDVTWILLRTVNNRTMHYSISKQKMAITKEHSITLNLTIMNVSLQDSGTYACRARNVYTGEEILQKKEITIRDQEAPYLLRNLSDHTVAISSSTTLDCHANGVPEPQITWFKNNHKIQQEPGIILGPGSSTLFIERVTEEDEGVYHCKATNQKGSVESSAYLTVQGTSDKSNLELITLTCTCVAATLFWLLLTLLIRKMKRSSSEIKTDYLSIIMDPDEVPLDEQCERLPYDASKWEFARERLKLGKSLGRGAFGKVVQASAFGIKKSPTCRTVAVKMLKEGATASEYKALMTELKILTHIGHHLNVVNLLGACTKQGGPLMVIVEYCKYGNLSNYLKSKRDLFFLNKDAALHMEPKKEKMEPGLEQGKKPRLDSVTSSESFASSGFQEDKSLSDVEEEEDSDGFYKEPITMEDLISYSFQVARGMEFLSSRKCIHRDLAARNILLSENNVVKICDFGLARDIYKNPDYVRKGDTRLPLKWMAPESIFDKIYSTKSDVWSYGVLLWEIFSLGGSPYPGVQMDEDFCSRLREGMRMRAPEYSTPEIYQIMLDCWHRDPKERPRFAELVEKLGDLLQANVQQDGKDYIPINAILTGNSGFTYSTPAFSEDFFKESISAPKFNSGSSDDVRYVNAFKFMSLERIKTFEELLPNATSMFDDYQGDSSTLLASPMLKRFTWTDSKPKASLKIDLRVTSKSKESGLSDVSRPSFCHSSCGHVSEGKRRFTYDHAELERKIACCSPPPDYNSVVLYSTPPI

SEQ ID NO: 255 - DNA, 5830 bp, Homo sapiens
  misc_feature 1..5830: note = VEGFR2
  source 1..5830: mol_type = genomic DNA
actgagtcccgggaccccgggagagcggtcagtgtgtggtcgctgcgtttcctctgcctgcgccgggcatcacttgcgcgccgcagaaagtccgtctggcagcctggatatcctctcctaccggcacccgcagacgcccctgcagccgccggtcggcgcccgggctccctagccctgtgcgctcaactgtcctgcgctgcggggtgccgcgagttccacctccgcgcctccttctctagacaggcgctgggagaaagaaccggctcccgagttctgggcatttcgcccggctcgaggtgcaggatgcagagcaaggtgctgctggccgtcgccctgtggctctgcgtggagacccgggccgcctctgtgggtttgcctagtgtttctcttgatctgcccaggctcagcatacaaaaagacatacttacaattaaggctaatacaactcttcaaattacttgcaggggacagagggacttggactggctttggcccaataatcagagtggcagtgagcaaagggtggaggtgactgagtgcagcgatggcctcttctgtaagacactcacaattccaaaagtgatcggaaatgacactggagcctacaagtgcttctaccgggaaactgacttggcctcggtcatttatgtctatgttcaagattacagatctccatttattgcttctgttagtgaccaacatggagtcgtgtacattactgagaacaaaaacaaaactgtggtgattccatgtctcgggtccatttcaaatctcaacgtgtcactttgtgcaagatacccagaaaagagatttgttcctgatggtaacagaatttcctgggacagcaagaagggctttactattcccagctacatgatcagctatgctggcatggtcttctgtgaagcaaaaattaatgatgaaagttaccagtctattatgtacatagttgtcgttgtagggtataggatttatgatgtggttctgagtccgtctcatggaattgaactatctgttggagaaaagcttgtcttaaattgtacagcaagaactgaactaaatgtggggattgacttcaactgggaatacccttcttcgaagcatcagcataagaaacttgtaaaccgagacctaaaaacccagtctgggagtgagatgaagaaatttttgagcaccttaactatagatggtgtaacccggagtgaccaaggattgtacacctgtgcagcatccagtgggctgatgaccaagaagaacagcacatttgtcagggtccatgaaaaaccttttgttgcttttggaagtggcatggaatctctggtggaagccacggtgggggagcgtgtcagaatccctgcgaagtaccttggttacccacccccagaaataaaatggtataaaaatggaataccccttgagtccaatcacacaattaaagcggggcatgtactgacgattatggaagtgagtgaaagagacacaggaaattacactgtcatccttaccaatcccatttcaaaggagaagcagagccatgtggtctctctggttgtgtatgtcccaccccagattggtgagaaatctctaatctctcctgtggattcctaccagtacggcaccactcaaacgctgacatgtacggtctatgccattcctcccccgcatcacatccactggtattggcagttggaggaagagtgcgccaacgagcccagccaagctgtctcagtgacaaacccatacccttgtgaagaatggagaagtgtggaggacttccagggaggaaataaaattgaagttaataaaaatcaatttgctctaattgaaggaaaaaacaaaactgtaagtacccttgttatccaagcggcaaatgtgtcagctttgtacaaatgtgaagcggtcaacaaagtcgggagaggagagagggtgatctccttccacgtgaccaggggtcctgaaattactttgcaacctgacatgcagcccactgagcaggagagcgtgtctttgtggtgcactgcagacagatctacgtttgagaacctcacatggtacaagcttggcccacagcctctgccaatccatgtgggagagttgcccacacctgtttgcaagaacttggatactctttggaaattgaatgccaccatgttctctaatagcacaaatgacattttgatcatggagcttaagaatgcatccttgcaggaccaaggagactatgtctgccttgctcaagacaggaagaccaagaaaagacattgcgtggtcaggcagctcacagtcctagagcgtgtggcacccacgatcacaggaaacctggagaatcagacgacaagtattggggaaagcatcgaagtctcatgcacggcatctgggaatccccctccacagatcatgtggtttaaagataatgagacccttgtagaagactcaggcattgtattgaaggatgggaaccggaacctcactatccgcagagtgaggaaggaggacgaaggcctctacacctgccaggcatgcagtgttcttggctgtgcaaaagtggaggcatttttcataatagaaggtgcccaggaaaagacgaacttggaaatcattattctagtaggcacggcggtgattgccatgttcttctggctacttcttgtcatcatcctacggaccgttaagcgggccaatggaggggaactgaagacaggctacttgtccatcgtcatggatccagatgaactcccattggatgaacattgtgaacgactgccttatgatgccagcaaatgggaattccccagagaccggctgaagctaggtaagcctcttggccgtggtgcctttggccaagtgattgaagcagatgcctttggaattgacaagacagcaacttgcaggacagtagcagtcaaaatgttgaaagaaggagcaacacacagtgagcatcgagctctcatgtctgaactcaagatcctcattcatattggtcaccatctcaatgtggtcaaccttctaggtgcctgtaccaagccaggagggccactcatggtgattgtggaattctgcaaatttggaaacctgtccacttacctgaggagcaagagaaatgaatttgtcccctacaagaccaaaggggcacgattccgtcaagggaaagactacgttggagcaatccctgtggatctgaaacggcgcttggacagcatcaccagtagccagagctcagccagctctggatttgtggaggagaagtccctcagtgatgtagaagaagaggaagctcctgaagatctgtataaggacttcctgaccttggagcatctcatctgttacagcttccaagtggctaagggcatggagttcttggcatcgcgaaagtgtatccacagggacctggcggcacgaaatatcctcttatcggagaagaacgtggttaaaatctgtgactttggcttggcccgggatatttataaagatccagattatgtcagaaaaggagatgctcgcctccctttgaaatggatggccccagaaacaatttttgacagagtgtacacaatccagagtgacgtctggtcttttggtgttttgctgtgggaaatattttccttaggtgcttctccatatcctggggtaaagattgatgaagaattttgtaggcgattgaaagaaggaactagaatgagggcccctgattatactacaccagaaatgtaccagaccatgctggactgctggcacggggagcccagtcagagacccacgttttcagagttggtggaacatttgggaaatctcttgcaagctaatgctcagcaggatggcaaagactacattgttcttccgatatcagagactttgagcatggaagaggattctggactctctctgcctacctcacctgtttcctgtatggaggaggaggaagtatgtgaccccaaattccattatgacaacacagcaggaatcagtcagtatctgcagaacagtaagcgaaagagccggcctgtgagtgtaaaaacatttgaagatatcccgttagaagaaccagaagtaaaagtaatcccagatgacaaccagacggacagtggtatggttcttgcctcagaagagctgaaaactttggaagacagaaccaaattatctccatcttttggtggaatggtgcccagcaaaagcagggagtctgtggcatctgaaggctcaaaccagacaagcggctaccagtccggatatcactccgatgacacagacaccaccgtgtactccagtgaggaagcagaacttttaaagctgatagagattggagtgcaaaccggtagcacagcccagattctccagcctgactcggggaccacactgagctctcctcctgtttaaaaggaagcatccacaccccaactcccggacatcacatgagaggtctgctcagattttgaagtgttgttctttccaccagcaggaagtagccgcatttgattttcatttcgacaacagaaaaaggacctcggactgcagggagccagtcttctaggcatatcctggaagaggcttgtgacccaagaatgtgtctgtgtcttctcccagtgttgacctgatcctcttttttcattcatttaaaaagcattatcatgcccctgctgcgggtctcaccatgggtttagaacaaagagcttcaagcaatggccccatcctcaaagaagtagcagtacctggggagctgacacttctgtaaaactagaagataaaccaggcaacgtaagtgttcgaggtgttgaagatgggaaggatttgcagggctgagtctatccaagaggctttgtttaggacgtgggtcccaagccaagccttaagtgtggaattcggattgatagaaaggaagactaacgttaccttgctttggagagtactggagcctgcaaatgcattgtgtttgctctggtggaggtgggcatggggtctgttctgaaatgtaaagggttcagacggggtttctggttttagaaggttgcgtgttcttcgagttgggctaaagtagagttcgttgtgctgtttctgactcctaatgagagttccttccagaccgttagctgtctccttgccaagccccaggaagaaaatgatgcagctctggctccttgtctcccaggctgatcctttattcagaataccacaaagaaaggacattcagctcaaggctccctgccgtgttgaagagttctgactgcacaaaccagcttctggtttcttctggaatgaataccctcatatctgtcctgatgtgatatgtctgagactgaatgcgggaggttcaatgtgaagctgtgtgtggtgtcaaagtttcaggaaggattttacccttttgttcttccccctgtccccaacccactctcaccccgcaacccatcagtattttagttatttggcctctactccagtaaacctgattgggtttgttcactctctgaatgattattagccagacttcaaaattattttatagcccaaattataacatctattgtattatttagacttttaacatatagagctatttctactgatttttgcccttgttctgtcctttttttcaaaaaagaaaatgtgttttttgtttggtaccatagtgtgaaatgctgggaacaatgactataagacatgctatggcacatatatttatagtctgtttatgtagaaacaaatgtaatatattaaagccttatatataatgaactttgtactattcacattttgtatcagtattatgtagcataacaaaggtcataatgctttcagcaattgatgtcattttattaaagaacattgaaaaacttga

SEQ ID NO: 256 - protein, 1356 aa, Homo sapiens
  REGION 1..1356: note = VEGFR2
MQSKVLLAVALWLCVETRAASVGLPSVSLDLPRLSIQKDILTIKANTTLQITCRGQRDLDWLWPNNQSGSEQRVEVTECSDGLFCKTLTIPKVIGNDTGAYKCFYRETDLASVIYVYVQDYRSPFIASVSDQHGVVYITENKNKTVVIPCLGSISNLNVSLCARYPEKRFVPDGNRISWDSKKGFTIPSYMISYAGMVFCEAKINDESYQSIMYIVVVVGYRIYDVVLSPSHGIELSVGEKLVLNCTARTELNVGIDFNWEYPSSKHQHKKLVNRDLKTQSGSEMKKFLSTLTIDGVTRSDQGLYTCAASSGLMTKKNSTFVRVHEKPFVAFGSGMESLVEATVGERVRIPAKYLGYPPPEIKWYKNGIPLESNHTIKAGHVLTIMEVSERDTGNYTVILTNPISKEKQSHVVSLVVYVPPQIGEKSLISPVDSYQYGTTQTLTCTVYAIPPPHHIHWYWQLEEECANEPSQAVSVTNPYPCEEWRSVEDFQGGNKIEVNKNQFALIEGKNKTVSTLVIQAANVSALYKCEAVNKVGRGERVISFHVTRGPEITLQPDMQPTEQESVSLWCTADRSTFENLTWYKLGPQPLPIHVGELPTPVCKNLDTLWKLNATMFSNSTNDILIMELKNASLQDQGDYVCLAQDRKTKKRHCVVRQLTVLERVAPTITGNLENQTTSIGESIEVSCTASGNPPPQIMWFKDNETLVEDSGIVLKDGNRNLTIRRVRKEDEGLYTCQACSVLGCAKVEAFFIIEGAQEKTNLEIIILVGTAVIAMFFWLLLVIILRTVKRANGGELKTGYLSIVMDPDELPLDEHCERLPYDASKWEFPRDRLKLGKPLGRGAFGQVIEADAFGIDKTATCRTVAVKMLKEGATHSEHRALMSELKILIHIGHHLNVVNLLGACTKPGGPLMVIVEFCKFGNLSTYLRSKRNEFVPYKTKGARFRQGKDYVGAIPVDLKRRLDSITSSQSSASSGFVEEKSLSDVEEEEAPEDLYKDFLTLEHLICYSFQVAKGMEFLASRKCIHRDLAARNILLSEKNVVKICDFGLARDIYKDPDYVRKGDARLPLKWMAPETIFDRVYTIQSDVWSFGVLLWEIFSLGASPYPGVKIDEEFCRRLKEGTRMRAPDYTTPEMYQTMLDCWHGEPSQRPTFSELVEHLGNLLQANAQQDGKDYIVLPISETLSMEEDSGLSLPTSPVSCMEEEEVCDPKFHYDNTAGISQYLQNSKRKSRPVSVKTFEDIPLEEPEVKVIPDDNQTDSGMVLASEELKTLEDRTKLSPSFGGMVPSKSRESVASEGSNQTSGYQSGYHSDDTDTTVYSSEEAELLKLIEIGVQTGSTAQILQPDSGTTLSSPPV

SEQ ID NO: 257 - DNA, 4514 bp, Homo sapiens
  misc_feature 1..4514: note = VEGFR3
  source 1..4514: mol_type = genomic DNA
aggccagccggcgcccgcgcggacactttcagccccgagccgcggccgctcgggtcggacccacgcgcagcggccggagatgcagcggggcgccgcgctgtgcctgcgactgtggctctgcctgggactcctggacggcctggtgagtggctactccatgacccccccgaccttgaacatcacggaggagtcacacgtcatcgacaccggtgacagcctgtccatctcctgcaggggacagcaccccctcgagtgggcttggccaggagctcaggaggcgccagccaccggagacaaggacagcgaggacacgggggtggtgcgagactgcgagggcacagacgccaggccctactgcaaggtgttgctgctgcacgaggtacatgccaacgacacaggcagctacgtctgctactacaagtacatcaaggcacgcatcgagggcaccacggccgccagctcctacgtgttcgtgagagactttgagcagccattcatcaacaagcctgacacgctcttggtcaacaggaaggacgccatgtgggtgccctgtctggtgtccatccccggcctcaatgtcacgctgcgctcgcaaagctcggtgctgtggccagacgggcaggaggtggtgtgggatgaccggcggggcatgctcgtgtccacgccactgctgcacgatgccctgtacctgcagtgcgagaccacctggggagaccaggacttcctttccaaccccttcctggtgcacatcacaggcaacgagctctatgacatccagctgttgcccaggaagtcgctggagctgctggtaggggagaagctggtcctgaactgcaccgtgtgggctgagtttaactcaggtgtcacctttgactgggactacccagggaagcaggcagagcggggtaagtgggtgcccgagcgacgctcccagcagacccacacagaactctccagcatcctgaccatccacaacgtcagccagcacgacctgggctcgtatgtgtgcaaggccaacaacggcatccagcgatttcgggagagcaccgaggtcattgtgcatgaaaatcccttcatcagcgtcgagtggctcaaaggacccatcctggaggccacggcaggagacgagctggtgaagctgcccgtgaagctggcagcgtaccccccgcccgagttccagtggtacaaggatggaaaggcactgtccgggcgccacagtccacatgccctggtgctcaaggaggtgacagaggccagcacaggcacctacaccctcgccctgtggaactccgctgctggcctgaggcgcaacatcagcctggagctggtggtgaatgtgcccccccagatacatgagaaggaggcctcctcccccagcatctactcgcgtcacagccgccaggccctcacctgcacggcctacggggtgcccctgcctctcagcatccagtggcactggcggccctggacaccctgcaagatgtttgcccagcgtagtctccggcggcggcagcagcaagacctcatgccacagtgccgtgactggagggcggtgaccacgcaggatgccgtgaaccccatcgagagcctggacacctggaccgagtttgtggagggaaagaataagactgtgagcaagctggtgatccagaatgccaacgtgtctgccatgtacaagtgtgtggtctccaacaaggtgggccaggatgagcggctcatctacttctatgtgaccaccatccccgacggcttcaccatcgaatccaagccatccgaggagctactagagggccagccggtgctcctgagctgccaagccgacagctacaagtacgagcatctgcgctggtaccgcctcaacctgtccacgctgcacgatgcgcacgggaacccgcttctgctcgactgcaagaacgtgcatctgttcgccacccctctggccgccagcctggaggaggtggcacctggggcgcgccacgccacgctcagcctgagtatcccccgcgtcgcgcccgagcacgagggccactatgtgtgcgaagtgcaagaccggcgcagccatgacaagcactgccacaagaagtacctgtcggtgcaggccctggaagcccctcggctcacgcagaacttgaccgacctcctggtgaacgtgagcgactcgctggagatgcagtgcttggtggccggagcgcacgcgcccagcatcgtgtggtacaaagacgagaggctgctggaggaaaagtctggagtcgacttggcggactccaaccagaagctgagcatccagcgcgtgcgcgaggaggatgcgggacgctatctgtgcagcgtgtgcaacgccaagggctgcgtcaactcctccgccagcgtggccgtggaaggctccgaggataagggcagcatggagatcgtgatccttgtcggtaccggcgtcatcgctgtcttcttctgggtcctcctcctcctcatcttctgtaacatgaggaggccggcccacgcagacatcaagacgggctacctgtccatcatcatggaccccggggaggtgcctctggaggagcaatgcgaatacctgtcctacgatgccagccagtgggaattcccccgagagcggctgcacctggggagagtgctcggctacggcgccttcgggaaggtggtggaagcctccgctttcggcatccacaagggcagcagctgtgacaccgtggccgtgaaaatgctgaaagagggcgccacggccagcgagcaccgcgcgctgatgtcggagctcaagatcctcattcacatcggcaaccacctcaacgtggtcaacctcctcggggcgtgcaccaagccgcagggccccctcatggtgatcgtggagttctgcaagtacggcaacctctccaacttcctgcgcgccaagcgggacgccttcagcccctgcgcggagaagtctcccgagcagcgcggacgcttccgcgccatggtggagctcgccaggctggatcggaggcggccggggagcagcgacagggtcctcttcgcgcggttctcgaagaccgagggcggagcgaggcgggcttctccagaccaagaagctgaggacctgtggctgagcccgctgaccatggaagatcttgtctgctacagcttccaggtggccagagggatggagttcctggcttcccgaaagtgcatccacagagacctggctgctcggaacattctgctgtcggaaagcgacgtggtgaagatctgtgactttggccttgcccgggacatctacaaagaccccgactacgtccgcaagggcagtgcccggctgcccctgaagtggatggcccctgaaagcatcttcgacaaggtgtacaccacgcagagtgacgtgtggtcctttggggtgcttctctgggagatcttctctctgggggcctccccgtaccctggggtgcagatcaatgaggagttctgccagcggctgagagacggcacaaggatgagggccccggagctggccactcccgccatacgccgcatcatgctgaactgctggtccggagaccccaaggcgagacctgcattctcggagctggtggagatcctgggggacctgctccagggcaggggcctgcaagaggaagaggaggtctgcatggccccgcgcagctctcagagctcagaagagggcagcttctcgcaggtgtccaccatggccctacacatcgcccaggctgacgctgaggacagcccgccaagcctgcagcgccacagcctggccgccaggtattacaactgggtgtcctttcccgggtgcctggccagaggggctgagacccgtggttcctccaggatgaagacatttgaggaattccccatgaccccaacgacctacaaaggctctgtggacaaccagacagacagtgggatggtgctggcctcggaggagtttgagcagatagagagcaggcatagacaagaaagcggcttcaggtagctgaagcagagagagagaaggcagcatacgtcagcattttcttctctgcacttataagaaagatcaaagactttaagactttcgctatttcttctactgctatctactacaaacttcaaagaggaaccaggaggacaagaggagcatgaaagtggacaaggagtgtgaccactgaagcaccacagggaggggttaggcctccggatgactgcgggcaggcctggataatatccagcctcccacaagaagctggtggagcagagtgttccctgactcctccaaggaaagggagacgccctttcatggtctgctgagtaacaggtgccttcccagacactggcgttactgcttgaccaaagagccctcaagcggcccttatgccagcgtgacagagggctcacctcttgccttctaggtcacttctcacaatgtcccttcagcacctgaccctgtgcccaccagttattccttggtaatatgagtaatacatcaaagagtagtattaaaagctaattaatcatgtttataaaaaaaaaaa

SEQ ID NO: 258 - protein, 1298 aa, Homo sapiens
  REGION 1..1298: note = VEGFR3
MQRGAALCLRLWLCLGLLDGLVSGYSMTPPTLNITEESHVIDTGDSLSISCRGQHPLEWAWPGAQEAPATGDKDSEDTGVVRDCEGTDARPYCKVLLLHEVHANDTGSYVCYYKYIKARIEGTTAASSYVFVRDFEQPFINKPDTLLVNRKDAMWVPCLVSIPGLNVTLRSQSSVLWPDGQEVVWDDRRGMLVSTPLLHDALYLQCETTWGDQDFLSNPFLVHITGNELYDIQLLPRKSLELLVGEKLVLNCTVWAEFNSGVTFDWDYPGKQAERGKWVPERRSQQTHTELSSILTIHNVSQHDLGSYVCKANNGIQRFRESTEVIVHENPFISVEWLKGPILEATAGDELVKLPVKLAAYPPPEFQWYKDGKALSGRHSPHALVLKEVTEASTGTYTLALWNSAAGLRRNISLELVVNVPPQIHEKEASSPSIYSRHSRQALTCTAYGVPLPLSIQWHWRPWTPCKMFAQRSLRRRQQQDLMPQCRDWRAVTTQDAVNPIESLDTWTEFVEGKNKTVSKLVIQNANVSAMYKCVVSNKVGQDERLIYFYVTTIPDGFTIESKPSEELLEGQPVLLSCQADSYKYEHLRWYRLNLSTLHDAHGNPLLLDCKNVHLFATPLAASLEEVAPGARHATLSLSIPRVAPEHEGHYVCEVQDRRSHDKHCHKKYLSVQALEAPRLTQNLTDLLVNVSDSLEMQCLVAGAHAPSIVWYKDERLLEEKSGVDLADSNQKLSIQRVREEDAGRYLCSVCNAKGCVNSSASVAVEGSEDKGSMEIVILVGTGVIAVFFWVLLLLIFCNMRRPAHADIKTGYLSIIMDPGEVPLEEQCEYLSYDASQWEFPRERLHLGRVLGYGAFGKVVEASAFGIHKGSSCDTVAVKMLKEGATASEHRALMSELKILIHIGNHLNVVNLLGACTKPQGPLMVIVEFCKYGNLSNFLRAKRDAFSPCAEKSPEQRGRFRAMVELARLDRRRPGSSDRVLFARFSKTEGGARRASPDQEAEDLWLSPLTMEDLVCYSFQVARGMEFLASRKCIHRDLAARNILLSESDVVKICDFGLARDIYKDPDYVRKGSARLPLKWMAPESIFDKVYTTQSDVWSFGVLLWEIFSLGASPYPGVQINEEFCQRLRDGTRMRAPELATPAIRRIMLNCWSGDPKARPAFSELVEILGDLLQGRGLQEEEEVCMAPRSSQSSEEGSFSQVSTMALHIAQADAEDSPPSLQRHSLAARYYNWVSFPGCLARGAETRGSSRMKTFEEFPMTPTTYKGSVDNQTDSGMVLASEEFEQIESRHRQESGFR

SEQ ID NO: 259 - DNA, 4989 bp, Homo sapiens
  misc_feature 1..4989: note = IGF-1R
  source 1..4989: mol_type = genomic DNA
ttttttttttttttgagaaagggaatttcatcccaaataaaaggaatgaagtctggctccggaggagggtccccgacctcgctgtgggggctcctgtttctctccgccgcgctctcgctctggccgacgagtggagaaatctgcgggccaggcatcgacatccgcaacgactatcagcagctgaagcgcctggagaactgcacggtgatcgagggctacctccacatcctgctcatctccaaggccgaggactaccgcagctaccgcttccccaagctcacggtcattaccgagtacttgctgctgttccgagtggctggcctcgagagcctcggagacctcttccccaacctcacggtcatccgcggctggaaactcttctacaactacgccctggtcatcttcgagatgaccaatctcaaggatattgggctttacaacctgaggaacattactcggggggccatcaggattgagaaaaatgctgacctctgttacctctccactgtggactggtccctgatcctggatgcggtgtccaataactacattgtggggaataagcccccaaaggaatgtggggacctgtgtccagggaccatggaggagaagccgatgtgtgagaagaccaccatcaacaatgagtacaactaccgctgctggaccacaaaccgctgccagaaaatgtgcccaagcacgtgtgggaagcgggcgtgcaccgagaacaatgagtgctgccaccccgagtgcctgggcagctgcagcgcgcctgacaacgacacggcctgtgtagcttgccgccactactactatgccggtgtctgtgtgcctgcctgcccgcccaacacctacaggtttgagggctggcgctgtgtggaccgtgacttctgcgccaacatcctcagcgccgagagcagcgactccgaggggtttgtgatccacgacggcgagtgcatgcaggagtgcccctcgggcttcatccgcaacggcagccagagcatgtactgcatcccttgtgaaggtccttgcccgaaggtctgtgaggaagaaaagaaaacaaagaccattgattctgttacttctgctcagatgctccaaggatgcaccatcttcaagggcaatttgctcattaacatccgacgggggaataacattgcttcagagctggagaacttcatggggctcatcgaggtggtgacgggctacgtgaagatccgccattctcatgccttggtctccttgtccttcctaaaaaaccttcgcctcatcctaggagaggagcagctagaagggaattactccttctacgtcctcgacaaccagaacttgcagcaactgtgggactgggaccaccgcaacctgaccatcaaagcagggaaaatgtactttgctttcaatcccaaattatgtgtttccgaaatttaccgcatggaggaagtgacggggactaaagggcgccaaagcaaaggggacataaacaccaggaacaacggggagagagcctcctgtgaaagtgacgtcctgcatttcacctccaccaccacgtcgaagaatcgcatcatcataacctggcaccggtaccggccccctgactacagggatctcatcagcttcaccgtttactacaaggaagcaccctttaagaatgtcacagagtatgatgggcaggatgcctgcggctccaacagctggaacatggtggacgtggacctcccgcccaacaaggacgtggagcccggcatcttactacatgggctgaagccctggactcagtacgccgtttacgtcaaggctgtgaccctcaccatggtggagaacgaccatatccgtggggccaagagtgagatcttgtacattcgcaccaatgcttcagttccttccattcccttggacgttctttcagcatcgaactcctcttctcagttaatcgtgaagtggaaccctccctctctgcccaacggcaacctgagttactacattgtgcgctggcagcggcagcctcaggacggctacctttaccggcacaattactgctccaaagacaaaatccccatcaggaagtatgccgacggcaccatcgacattgaggaggtcacagagaaccccaagactgaggtgtgtggtggggagaaagggccttgctgcgcctgccccaaaactgaagccgagaagcaggccgagaaggaggaggctgaataccgcaaagtctttgagaatttcctgcacaactccatcttcgtgcccagacctgaaaggaagcggagagatgtcatgcaagtggccaacaccaccatgtccagccgaagcaggaacaccacggccgcagacacctacaacatcaccgacccggaagagctggagacagagtaccctttctttgagagcagagtggataacaaggagagaactgtcatttctaaccttcggcctttcacattgtaccgcatcgatatccacagctgcaaccacgaggctgagaagctgggctgcagcgcctccaacttcgtctttgcaaggactatgcccgcagaaggagcagatgacattcctgggccagtgacctgggagccaaggcctgaaaactccatctttttaaagtggccggaacctgagaatcccaatggattgattctaatgtatgaaataaaatacggatcacaagttgaggatcagcgagaatgtgtgtccagacaggaatacaggaagtatggaggggccaagctaaaccggctaaacccggggaactacacagcccggattcaggccacatctctctctgggaatgggtcgtggacagatcctgtgttcttctatgtccaggccaaaacaggatatgaaaacttcatccatctgatcatcgctctgcccgtcgctgtcctgttgatcgtgggagggttggtgattatgctgtacgtcttccatagaaagagaaataacagcaggctggggaatggagtgctgtatgcctctgtgaacccggagtacttcagcgctgctgatgtgtacgttcctgatgagtgggaggtggctcgggagaagatcaccatgagccgggaacttgggcaggggtcgtttgggatggtctatgaaggagttgccaagggtgtggtgaaagatgaacctgaaaccagagtggccattaaaacagtgaacgaggccgcaagcatgcgtgagaggattgagtttctcaacgaagcttctgtgatgaaggagttcaattgtcaccatgtggtgcgattgctgggtgtggtgtcccaaggccagccaacactggtcatcatggaactgatgacacggggcgatctcaaaagttatctccggtctctgaggccagaaatggagaataatccagtcctagcacctccaagcctgagcaagatgattcagatggccggagagattgcagacggcatggcatacctcaacgccaataagttcgtccacagagaccttgctgcccggaattgcatggtagccgaagatttcacagtcaaaatcggagattttggtatgacgcgagatatctatgagacagactattaccggaaaggaggcaaagggctgctgcccgtgcgctggatgtctcctgagtccctcaaggatggagtcttcaccacttactcggacgtctggtccttcggggtcgtcctctgggagatcgccacactggccgagcagccctaccagggcttgtccaacgagcaagtccttcgcttcgtcatggagggcggccttctggacaagccagacaactgtcctgacatgctgtttgaactgatgcgcatgtgctggcagtataaccccaagatgaggccttccttcctggagatcatcagcagcatcaaagaggagatggagcctggcttccgggaggtctccttctactacagcgaggagaacaagctgcccgagccggaggagctggacctggagccagagaacatggagagcgtccccctggacccctcggcctcctcgtcctccctgccactgcccgacagacactcaggacacaaggccgagaacggccccggccctggggtgctggtcctccgcgccagcttcgacgagagacagccttacgcccacatgaacgggggccgcaagaacgagcgggccttgccgctgccccagtcttcgacctgctgatccttggatcctgaatctgtgcaaacagtaacgtgtgcgcacgcgcagcggggtggggggggagagagagttttaacaatccattcacaagcctcctgtacctcagtggatcttcagttctgcccttgctgcccgcgggagacagcttctctgcagtaaaacacatttgggatgttccttttttcaatatgcaagcagctttttattccctgcccaaacccttaactgacatgggcctttaagaaccttaatgacaacacttaatagcaacagagcacttgagaaccagtctcctcactctgtccctgtccttccctgttctccctttctctctcctctctgcttcataacggaaaaataattgccacaagtccagctgggaagccctttttatcagtttgaggaagtggctgtccctgtggccccatccaaccactgtacacacccgcctgacaccgtgggtcattacaaaaaaacacgtggagatggaaatttttacctttatctttcacctttctagggacatgaaatttacaaagggccatcgttcatccaaggctgttaccattttaacgctgcctaattttgccaaaatcctgaactttctccctcatcggcccggcgctgattcctcgtgtccggaggcatgggtgagcatggcagctggttgctccatttgagagacacgctggcgacacactccgtccatccgactgcccctgctgtgctgctcaaggccacaggcacacaggtctcattgcttctgactagattattatttgggggaactggacacaataggtctttctctcagtgaaggtggggagaagctgaaccggc

SEQ ID NO: 260 - protein, 1367 aa, Homo sapiens
MKSGSGGGSPTSLWGLLFLSAALSLWPTSGEICGPGIDIRNDYQQLKRLENCTVIEGYLHILLISKAEDYRSYRFPKLTVITEYLLLFRVAGLESLGDLFPNLTVIRGWKLFYNYALVIFEMTNLKDIGLYNLRNITRGAIRIEKNADLCYLSTVDWSLILDAVSNNYIVGNKPPKECGDLCPGTMEEKPMCEKTTINNEYNYRCWTTNRCQKMCPSTCGKRACTENNECCHPECLGSCSAPDNDTACVACRHYYYAGVCVPACPPNTYRFEGWRCVDRDFCANILSAESSDSEGFVIHDGECMQECPSGFIRNGSQSMYCIPCEGPCPKVCEEEKKTKTIDSVTSAQMLQGCTIFKGNLLINIRRGNNIASELENFMGLIEVVTGYVKIRHSHALVSLSFLKNLRLILGEEQLEGNYSFYVLDNQNLQQLWDWDHRNLTIKAGKMYFAFNPKLCVSEIYRMEEVTGTKGRQSKGDINTRNNGERASCESDVLHFTSTTTSKNRIIITWHRYRPPDYRDLISFTVYYKEAPFKNVTEYDGQDACGSNSWNMVDVDLPPNKDVEPGILLHGLKPWTQYAVYVKAVTLTMVENDHIRGAKSEILYIRTNASVPSIPLDVLSASNSSSQLIVKWNPPSLPNGNLSYYIVRWQRQPQDGYLYRHNYCSKDKIPIRKYADGTIDIEEVTENPKTEVCGGEKGPCCACPKTEAEKQAEKEEAEYRKVFENFLHNSIFVPRPERKRRDVMQVANTTMSSRSRNTTAADTYNITDPEELETEYPFFESRVDNKERTVISNLRPFTLYRIDIHSCNHEAEKLGCSASNFVFARTMPAEGADDIPGPVTWEPRPENSIFLKWPEPENPNGLILMYEIKYGSQVEDQRECVSRQEYRKYGGAKLNRLNPGNYTARIQATSLSGNGSWTDPVFFYVQAKTGYENFIHLIIALPVAVLLIVGGLVIMLYVFHRKRNNSRLGNGVLYASVNPEYFSAADVYVPDEWEVAREKITMSRELGQGSFGMVYEGVAKGVVKDEPETRVAIKTVNEAASMRERIEFLNEASVMKEFNCHHVVRLLGVVSQGQPTLVIMELMTRGDLKSYLRSLRPEMENNPVLAPPSLSKMIQMAGEIADGMAYLNANKFVHRDLAARNCMVAEDFTVKIGDFGMTRDIYETDYYRKGGKGLLPVRWMSPESLKDGVFTTYSDVWSFGVVLWEIATLAEQPYQGLSNEQVLRFVMEGGLLDKPDNCPDMLFELMRMCWQYNPKMRPSFLEIISSIKEEMEPGFREVSFYYSEENKLPEPEELDLEPENMESVPLDPSASSSSLPLPDRHSGHKAENGPGPGVLVLRASFDERQPYAHMNGGRKNERALPLPQSSTC

SEQ ID NO: 261 - DNA, 1391 bp, Homo sapiens
  misc_feature 1..1391: note = RAGE
  source 1..1391: mol_type = genomic DNA
ggggcagccggaacagcagttggagcctgggtgctggtcctcagtctgtggggggcagtagtaggtgctcaaaacatcacagcccggattggcgagccactggtgctgaagtgtaagggggcccccaagaaaccaccccagcggctggaatggaaactgaacacaggccggacagaagcttggaaggtcctgtctccccagggaggaggcccctgggacagtgtggctcgtgtccttcccaacggctccctcttccttccggctgtcgggatccaggatgaggggattttccggtgcagggcaatgaacaggaatggaaaggagaccaagtccaactaccgagtccgtgtctaccagattcctgggaagccagaaattgtagattctgcctctgaactcacggctggtgttcccaataaggtggggacatgtgtgtcagagggaagctaccctgcagggactcttagctggcacttggatgggaagcccctggtgcctaatgagaagggagtatctgtgaaggaacagaccaggagacaccctgagacagggctcttcacactgcagtcggagctaatggtgaccccagcccggggaggagatccccgtcccaccttctcctgtagcttcagcccaggccttccccgacaccgggccttgcgcacagcccccatccagccccgtgtctgggagcctgtgcctctggaggaggtccaattggtggtggagccagaaggtggagcagtagctcctggtggaaccgtaaccctgacctgtgaagtccctgcccagccctctcctcaaatccactggatgaaggatggtgtgcccttgccccttccccccagccctgtgctgatcctccctgagatagggcctcaggaccagggaacctacagctgtgtggccacccattccagccacgggccccaggaaagccgtgctgtcagcatcagcatcatcgaaccaggcgaggaggggccaactgcaggctctgtgggaggatcagggctgggaactctagccctggccctggggatcctgggaggcctggggacagccgccctgctcattggggtcatcttgtggcaaaggcggcaacgccgaggagaggagaggaaggccccagaaaaccaggaggaagaggaggagcgtgcagaactgaatcagtcggaggaacctgaggcaggcgagagtagtactggagggccttgaggggcccacagacagatcccatccatcagctcccttttctttttcccttgaactgttctggcctcagaccaactctctcctgtataatctctctcctgtataaccccaccttgccaagctttcttctacaaccagagccccccacaatgatgattaaacacctgacacatcttgca

SEQ ID NO: 262 - protein, 404 aa, Homo sapiens
  REGION 1..404: note = RAGE
GAAGTAVGAWVLVLSLWGAVVGAQNITARIGEPLVLKCKGAPKKPPQRLEWKLNTGRTEAWKVLSPQGGGPWDSVARVLPNGSLFLPAVGIQDEGIFRCRAMNRNGKETKSNYRVRVYQIPGKPEIVDSASELTAGVPNKVGTCVSEGSYPAGTLSWHLDGKPLVPNEKGVSVKEQTRRHPETGLFTLQSELMVTPARGGDPRPTFSCSFSPGLPRHRALRTAPIQPRVWEPVPLEEVQLVVEPEGGAVAPGGTVTLTCEVPAQPSPQIHWMKDGVPLPLPPSPVLILPEIGPQDQGTYSCVATHSSHGPQESRAVSISIIEPGEEGPTAGSVGGSGLGTLALALGILGGLGTAALLIGVILWQRRQRRGEERKAPENQEEEEERAELNQSEEPEAGESSTGGP

SEQ ID NO: 263 - protein, 1210 aa, Homo sapiens
  VARIANT 628: note = Xaa= C or S
  VARIANT 98: note = Xaa= R or Q
  VARIANT 266: note = Xaa= P or R
  VARIANT 521: note = Xaa= R or K
  VARIANT 674: note = Xaa= V or I
  VARIANT 709: note = Xaa= E or A or K
  VARIANT 719: note = Xaa= G or A or C or D or S
  VARIANT 724: note = Xaa= G or S
  VARIANT 734: note = Xaa= E or K
  VARIANT 747: note = Xaa= L or F
  VARIANT 748: note = Xaa= R or P
  VARIANT 787: note = Xaa= Q or R
  VARIANT 790: note = Xaa= T or M
  VARIANT 833: note = Xaa= L or V
  VARIANT 834: note = Xaa= V or L
  VARIANT 858: note = Xaa= L or M or R
  VARIANT 861: note = Xaa= L or Q
  VARIANT 873: note = Xaa= G or E
  source 1..1210: note = precursor HER1 polypeptide
MRPSGTAGAALLALLAALCPASRALEEKKVCQGTSNKLTQLGTFEDHFLSLQRMFNNCEVVLGNLEITYVQRNYDLSFLKTIQEVAGYVLIALNTVEXIPLENLQIIRGNMYYENSYALAVLSNYDANKTGLKELPMRNLQEILHGAVRFSNNPALCNVESIQWRDIVSSDFLSNMSMDFQNHLGSCQKCDPSCPNGSCWGAGEENCQKLTKIICAQQCSGRCRGKSPSDCCHNQCAAGCTGPRESDCLVCRKFRDEATCKDTCPXLMLYNPTTYQMDVNPEGKYSFGATCVKKCPRNYVVTDHGSCVRACGADSYEMEEDGVRKCKKCEGPCRKVCNGIGIGEFKDSLSINATNIKHFKNCTSISGDLHILPVAFRGDSFTHTPPLDPQELDILKTVKEITGFLLIQAWPENRTDLHAFENLEIIRGRTKQHGQFSLAVVSLNITSLGLRSLKEISDGDVIISGNKNLCYANTINWKKLFGTSGQKTKIISNRGENSCKATGQVCHALCSPEGCWGPEPXDCVSCRNVSRGRECVDKCNLLEGEPREFVENSECIQCHPECLPQAMNITCTGRGPDNCIQCAHYIDGPHCVKTCPAGVMGENNTLVWKYADAGHVCHLCHPNCTYGXTGPGLEGCPTNGPKIPSIATGMVGALLLLLVVALGIGLFMRRRHIXRKRTLRRLLQERELVEPLTPSGEAPNQALLRILKXTEFKKIKVLXSGAFXTVYKGLWIPXGEKVKIPVAIKEXXEATSPKANKEILDEAYVMASVDNPHVCRLLGICLTSTVXLIXQLMPFGCLLDYVREHKDNIGSQYLLNWCVQIAKGMNYLEDRRXXHRDLAARNVLVKTPQHVKITDFGXAKXLGAEEKEYHAEXGKVPIKWMALESILHRIYTHQSDVWSYGVTVWELMTFGSKPYDGIPASEISSILEKGERLPQPPICTIDVYMIMVKCWMIDADSRPKFRELIIEFSKMARDPQRYLVIQGDERMHLPSPTDSNFYRALMDEEDMDDVVDADEYLIPQQGFFSSPSTSRTPLLSSLSATSNNSTVACIDRNGLQSCPIKEDSFLQRYSSDPTGALTEDSIDDTFLPVPEYINQSVPKRPAGSVQNPVYHNQPLNPAPSRDPHYQDPHSTAVGNPEYLNTVQPTCVNSTFDSPAHWAQKGSHQISLDNPDYQQDFFPKEAKPNGIFKGSTAENAEYLRVAPQSSEFIGA

SEQ ID NO: 264 - protein, 1255 aa, Homo sapiens
  VARIANT 452: note = Xaa= W or C
  VARIANT 654: note = Xaa= I or V
  VARIANT 655: note = Xaa = I or V
  VARIANT 1170: note = Xaa= P or A
  source 1..1255: note = precursor HER2 polypeptide
MELAALCRWGLLLALLPPGAASTQVCTGTDMKLRLPASPETHLDMLRHLYQGCQVVQGNLELTYLPTNASLSFLQDIQEVQGYVLIAHNQVRQVPLQRLRIVRGTQLFEDNYALAVLDNGDPLNNTTPVTGASPGGLRELQLRSLTEILKGGVLIQRNPQLCYQDTILWKDIFHKNNQLALTLIDTNRSRACHPCSPMCKGSRCWGESSEDCQSLTRTVCAGGCARCKGPLPTDCCHEQCAAGCTGPKHSDCLACLHFNHSGICELHCPALVTYNTDTFESMPNPEGRYTFGASCVTACPYNYLSTDVGSCTLVCPLHNQEVTAEDGTQRCEKCSKPCARVCYGLGMEHLREVRAVTSANIQEFAGCKKIFGSLAFLPESFDGDPASNTAPLQPEQLQVFETLEEITGYLYISAWPDSLPDLSVFQNLQVIRGRILHNGAYSLTLQGLGISXLGLRSLRELGSGLALIHHNTHLCFVHTVPWDQLFRNPHQALLHTANRPEDECVGEGLACHQLCARGHCWGPGPTQCVNCSQFLRGQECVEECRVLQGLPREYVNARHCLPCHPECQPQNGSVTCFGPEADQCVACAHYKDPPFCVARCPSGVKPDLSYMPIWKFPDEEGACQPCPINCTHSCVDLDDKGCPAEQRASPLTSXXSAVVGILLVVVLGVVFGILIKRRQQKIRKYTMRRLLQETELVEPLTPSGAMPNQAQMRILKETELRKVKVLGSGAFGTVYKGIWIPDGENVKIPVAIKVLRENTSPKANKEILDEAYVMAGVGSPYVSRLLGICLTSTVQLVTQLMPYGCLLDHVRENRGRLGSQDLLNWCMQIAKGMSYLEDVRLVHRDLAARNVLVKSPNHVKITDFGLARLLDIDETEYHADGGKVPIKWMALESILRRRFTHQSDVWSYGVTVWELMTFGAKPYDGIPAREIPDLLEKGERLPQPPICTIDVYMIMVKCWMIDSECRPRFRELVSEFSRMARDPQRFVVIQNEDLGPASPLDSTFYRSLLEDDDMGDLVDAEEYLVPQQGFFCPDPAPGAGGMVHHRHRSSSTRSGGGDLTLGLEPSEEEAPRSPLAPSEGAGSDVFDGDLGMGAAKGLQSLPTHDPSPLQRYSEDPTVPLPSETDGYVAPLTCSPQPEYVNQPDVRPQPPSPREGPLPAARPAGATLERXKTLSPGKNGVVKDVFAFGGAVENPEYLTPQGGAAPQPHPPPAFSPAFDNLYYWDQDPPERGAPPSTFKGTPTAENPEYLGLDVPV

SEQ ID NO: 265 - protein, 1342 aa, Homo sapiens
  VARIANT 560: note = Xaa= E or G
  VARIANT 1064: note = Xaa= E or G
  source 1..1342: note = precursor HER3 polypeptide
MRANDALQVLGLLFSLARGSEVGNSQAVCPGTLNGLSVTGDAENQYQTLYKLYERCEVVMGNLEIVLTGHNADLSFLQWIREVTGYVLVAMNEFSTLPLPNLRVVRGTQVYDGKFAIFVMLNYNTNSSHALRQLRLTQLTEILSGGVYIEKNDKLCHMDTIDWRDIVRDRDAEIVVKDNGRSCPPCHEVCKGRCWGPGSEDCQTLTKTICAPQCNGHCFGPNPNQCCHDECAGGCSGPQDTDCFACRHFNDSGACVPRCPQPLVYNKLTFQLEPNPHTKYQYGGVCVASCPHNFVVDQTSCVRACPPDKMEVDKNGLKMCEPCGGLCPKACEGTGSGSRFQTVDSSNIDGFVNCTKILGNLDFLITGLNGDPWHKIPALDPEKLNVFRTVREITGYLNIQSWPPHMHNFSVFSNLTTIGGRSLYNRGFSLLIMKNLNVTSLGFRSLKEISAGRIYISANRQLCYHHSLNWTKVLRGPTEERLDIKHNRPRRDCVAEGKVCDPLCSSGGCWGPGPGQCLSCRNYSRGGVCVTHCNFLNGEPREFAHEAECFSCHPECQPMXGTATCNGSGSDTCAQCAHFRDGPHCVSSCPHGVLGAKGPIYKYPDVQNECRPCHENCTQGCKGPELQDCLGQTLVLIGKTHLTMALTVIAGLVVIFMMLGGTFLYWRGRRIQNKRAMRRYLERGESIEPLDPSEKANKVLARIFKETELRKLKVLGSGVFGTVHKGVWIPEGESIKIPVCIKVIEDKSGRQSFQAVTDHMLAIGSLDHAHIVRLLGLCPGSSLQLVTQYLPLGSLLDHVRQHRGALGPQLLLNWGVQIAKGMYYLEEHGMVHRNLAARNVLLKSPSQVQVADFGVADLLPPDDKQLLYSEAKTPIKWMALESIHFGKYTHQSDVWSYGVTVWELMTFGAEPYAGLRLAEVPDLLEKGERLAQPQICTIDVYMVMVKCWMIDENIRPTFKELANEFTRMARDPPRYLVIKRESGPGIAPGPEPHGLTNKKLEEVELEPELDLDLDLEAEEDNLATTTLGSALSLPVGTLNRPRGSQSLLSPSSGYMPMNQGNLGXSCQESAVSGSSERCPRPVSLHPMPRGCLASESSEGHVTGSEAELQEKVSMCRSRSRSRSPRPRGDSAYHSQRHSLLTPVTPLSPPGLEEEDVNGYVMPDTHLKGTPSSREGTLSSVGLSSVLGTEEEDEDEEYEYMNRRRRHSPPHPPRPSSLEELGYEYMDVGSDLSASLGSTQSCPLHPVPIMPTAGTTPDEDYEYMNRQRDGGGPGGDYAAMGACPASEQGYEEMRAFQGPGHQAPHVHYARLKTLRSLEATDSAFDNPDYWHSRLFPKANAQRT

SEQ ID NO: 266 - protein, 1308 aa, Homo sapiens
  VARIANT 1035: note = Xaa= Y or A
  VARIANT 1301: note = Xaa= Y or A
  source 1..1308: note = precursor HER4 polypeptide
MKPATGLWVWVSLLVAAGTVQPSDSQSVCAGTENKLSSLSDLEQQYRALRKYYENCEVVMGNLEITSIEHNRDLSFLRSVREVTGYVLVALNQFRYLPLENLRIIRGTKLYEDRYALAIFLNYRKDGNFGLQELGLKNLTEILNGGVYVDQNKFLCYADTIHWQDIVRNPWPSNLTLVSTNGSSGCGRCHKSCTGRCWGPTENHCQTLTRTVCAEQCDGRCYGPYVSDCCHRECAGGCSGPKDTDCFACMNFNDSGACVTQCPQTFVYNPTTFQLEHNFNAKYTYGAFCVKKCPHNFVVDSSSCVRACPSSKMEVEENGIKMCKPCTDICPKACDGIGTGSLMSAQTVDSSNIDKFINCTKINGNLIFLVTGIHGDPYNAIEAIDPEKLNVFRTVREITGFLNIQSWPPNMTDFSVFSNLVTIGGRVLYSGLSLLILKQQGITSLQFQSLKEISAGNIYITDNSNLCYYHTINWTTLFSTINQRIVIRDNRKAENCTAEGMVCNHLCSSDGCWGPGPDQCLSCRRFSRGRICIESCNLYDGEFREFENGSICVECDPQCEKMEDGLLTCHGPGPDNCTKCSHFKDGPNCVEKCPDGLQGANSFIFKYADPDRECHPCHPNCTQGCNGPTSHDCIYYPWTGHSTLPQHARTPLIAAGVIGGLFILVIVGLTFAVYVRRKSIKKKRALRRFLETELVEPLTPSGTAPNQAQLRILKETELKRVKVLGSGAFGTVYKGIWVPEGETVKIPVAIKILNETTGPKANVEFMDEALIMASMDHPHLVRLLGVCLSPTIQLVTQLMPHGCLLEYVHEHKDNIGSQLLLNWCVQIAKGMMYLEERRLVHRDLAARNVLVKSPNHVKITDFGLARLLEGDEKEYNADGGKMPIKWMALECIHYRKFTHQSDVWSYGVTIWELMTFGGKPYDGIPTREIPDLLEKGERLPQPPICTIDVYMVMVKCWMIDADSRPKFKELAAEFSRMARDPQRYLVIQGDDRMKLPSPNDSKFFQNLLDEEDLEDMMDAEEYLVPQAFNIPPPIXTSRARIDSNRSEIGHSPPPAYTPMSGNQFVYRDGGFAAEQGVSVPYRAPTSTIPEAPVAQGATAEIFDDSCCNGTLRKPVAPHVQEDSSTQRYSADPTVFAPERSPRGELDEEGYMTPMRDKPKQEYLNPVEENPFVSRRKNGDLQALDNPEYHNASNGPPKAEDEYVNEPLYLNTFANTLGKAEYLKNNILSMPEKAKKAFDNPDYWNHSLPPRSTLQHPDYLQEYSTKYFYKQNGRIRPIVAENPEYLSEFSLKPGTVLPPPPXRHRNTVV

SEQ ID NO: 267-272 - skipped (6 entries)

SEQ ID NO: 273 - protein, 5 aa, synthetic construct
  REGION 1..5: note = peptide linker
GGGGG

SEQ ID NO: 274 - protein, 601 aa, synthetic construct
  REGION 1..601: note = HF210T
TQVCTGTDMKLRLPASPETHLDMLRHLYQGCQVVQGNLELTYLPTNASLSFLQDIQEVQGYVLIAHNQVRQVPLQRLRIVRGTQLFEDNYALAVLDNGDPLNNTTPVTGASPGGLRELQLRSLTEILKGGVLIQRNPQLCYQDTILWKDIFHKNNQLALTLIDTNRSRACHPCSPMCKGSRCWGESSEDCQSLTRTVCAGGCARCKGPLPTDCCHEQCAAGCTGPKHSDCLACLHFNHSGICELHCPALVTYNTDTFESMPNPEGRYTFGASCVTACPYNYLSTDVGSCTLVCPLHNQEVTAEDGTQRCEKCSKPCARVCYGLGMEHLREVRAVTSANIQEFAGCKKIFGSLAFLPESFDGDPASNTAPLQPEQLQVFETLEEITGYLYISAWPDSLPDLSVFQNLQVIRGRILHNGAYSLTLQGLGISWLGLRSLRELGSGLALIHHNTHLCFVHTVPWDQLFRNPHQALLHTANRPEDECVGEGLACHQLCARGHCWGPGPTQCVNCSQFLRGQECVEECRVLQGLPREYVNARHCLPCHPECQPQNGSVTCFGPEADQCVACAHYKDPPFLESRGPFEQKLISEEDLNMHTGHHHHHH

SEQ ID NO: 275 - protein, 536 aa, synthetic construct
  REGION 1..536: note = HF220T
TQVCTGTDMKLRLPASPETHLDMLRHLYQGCQVVQGNLELTYLPTNASLSFLQDIQEVQGYVLIAHNQVRQVPLQRLRIVRGTQLFEDNYALAVLDNGDPLNNTTPVTGASPGGLRELQLRSLTEILKGGVLIQRNPQLCYQDTILWKDIFHKNNQLALTLIDTNRSRACHPCSPMCKGSRCWGESSEDCQSLTRTVCAGGCARCKGPLPTDCCHEQCAAGCTGPKHSDCLACLHFNHSGICELHCPALVTYNTDTFESMPNPEGRYTFGASCVTACPYNYLSTDVGSCTLVCPLHNQEVTAEDGTQRCEKCSKPCARVCYGLGMEHLREVRAVTSANIQEFAGCKKIFGSLAFLPESFDGDPASNTAPLQPEQLQVFETLEEITGYLYISAWPDSLPDLSVFQNLQVIRGRILHNGAYSLTLQGLGISWLGLRSLRELGSGLALIHHNTHLCFVHTVPWDQLFRNPHQALLHTANRPEDECVGEGLACHQLCARGHCWGPGPTQCVNLESRGPFEQKLISEEDLNMHTGHHHHHH

SEQ ID NO: 276 - DNA, 20 bp, synthetic construct
  misc_feature 1..20: note = EGFR-F1 primer
  source 1..20: mol_type = other DNA
atcgggagagccggagcgag

SEQ ID NO: 277 - DNA, 20 bp, synthetic construct
  misc_feature 1..20: note = EGFR-F2 primer
  source 1..20: mol_type = other DNA
agcagcgatgcgaccctccg

SEQ ID NO: 278 - DNA, 20 bp, synthetic construct
  misc_feature 1..20: note = EGFR-int11R1 primer
  source 1..20: mol_type = other DNA
ccaggctttggctgtggtca

SEQ ID NO: 279 - DNA, 19 bp, synthetic construct
  misc_feature 1..19: note = HER2-F1 primer
  source 1..19: mol_type = other DNA
atggggccggagccgcagt

SEQ ID NO: 280 - DNA, 19 bp, synthetic construct
  misc_feature 1..19: note = HER2-F2 primer
  source 1..19: mol_type = other DNA
gcaccatggagctggcggc

SEQ ID NO: 281 - DNA, 21 bp, synthetic construct
  misc_feature 1..21: note = HER2-int11R1 primer
  source 1..21: mol_type = other DNA
atcaggccccctctttctcag

SEQ ID NO: 282 - DNA, 19 bp, synthetic construct
  misc_feature 1..19: note = HER3-F1 primer
  source 1..19: mol_type = other DNA
tcccttcaccctctgcgga

SEQ ID NO: 283 - DNA, 19 bp, synthetic construct
  misc_feature 1..19: note = HER3-F2 primer
  source 1..19: mol_type = other DNA
gcggagtcatgagggcgaa

SEQ ID NO: 284 - DNA, 24 bp, synthetic construct
  misc_feature 1..24: note = HER3-int11R1 primer
  source 1..24: mol_type = other DNA
ctgaagatgccatttcctccatac

SEQ ID NO: 285 - DNA, 24 bp, synthetic construct
  misc_feature 1..24: note = HER3-int10R1 primer
  source 1..24: mol_type = other DNA
caatttatgccagtggttcaccta

SEQ ID NO: 286 - DNA, 22 bp, synthetic construct
  misc_feature 1..22: note = HER4-F1 primer
  source 1..22: mol_type = other DNA
attgtcagcacgggatctgaga

SEQ ID NO: 287 - DNA, 24 bp, synthetic construct
  misc_feature 1..24: note = HER4-F2 primer
  source 1..24: mol_type = other DNA
ctgagacttccaaaaaatgaagcc

SEQ ID NO: 288 - DNA, 28 bp, synthetic construct
  misc_feature 1..28: note = HER4-int12R1 primer
  source 1..28: mol_type = other DNA
aatgggaaaaaatttaagtttctatgtt

SEQ ID NO: 289 - DNA, 4989 bp, Homo sapiens; identical to SEQ ID NO: 259
  misc_feature 1..4989: note = IGF1R mRNA
  source 1..4989: mol_type = genomic DNA

SEQ ID NO: 290 - protein, 1367 aa, Homo sapiens; identical to SEQ ID NO: 260
  REGION 1..1367: note = IGF1R protein

SEQ ID NO: 291 - DNA, 21 bp, synthetic construct
  misc_feature 1..21: note = IGF1R_F1 primer
  source 1..21: mol_type = other DNA
tgagaaagggaatttcatccc

SEQ ID NO: 292 - DNA, 20 bp, synthetic construct
  misc_feature 1..20: note = IGF1R_F2 primer
  source 1..20: mol_type = other DNA
aggaatgaagtctggctccg

SEQ ID NO: 293 - DNA, 20 bp, synthetic construct
  misc_feature 1..20: note = IGF1R_intron10R1 primer
  source 1..20: mol_type = other DNA
ggctccgtctcagtggctac

SEQ ID NO: 294 - DNA, 21 bp, synthetic construct
  misc_feature 1..21: note = IGF1R_intron11R1 primer
  source 1..21: mol_type = other DNA
ctaggttgtgaggaaggtggc

SEQ ID NO: 295 - DNA, 21 bp, synthetic construct
  misc_feature 1..21: note = IGF1R_intron12R1 primer
  source 1..21: mol_type = other DNA
aggaggtaacctgtgcagtca

SEQ ID NO: 296 - DNA, 21 bp, synthetic construct
  misc_feature 1..21: note = IGF1R_intron13R1 primer
  source 1..21: mol_type = other DNA
atgtaagccaggttgaaagca

SEQ ID NO: 297 - DNA, 2319 bp, synthetic construct
  misc_feature 1..2319: note = IGF1R/SR024A03
  source 1..2319: mol_type = other DNA
atgaagtctggctccggaggagggtccccgacctcgctgtgggggctcctgtttctctccgccgcgctctcgctctggccgacgagtggagaaatctgcgggccaggcatcgacatccgcaacgactatcagcagctgaagcgcctggagaactgcacggtgatcgagggctacctccacatcctgctcatctccaaggccgaggactaccgcagctaccgcttccccaagctcacggtcattaccgagtacttgctgctgttccgagtggctggcctcgagagcctcggagacctcttccccaacctcacggtcatccgcggctggaaactcttctacaactacgccctggtcatcttcgagatgaccaatctcaaggatattgggctttacaacctgaggaacattactcggggggccatcaggattgagaaaaatgctgacctctgttacctctccactgtggactggtccctgatcctggatgcggtgtccaataactacattgtggggaataagcccccaaaggaatgtggggacctgtgtccagggaccatggaggagaagccgatgtgtgagaagaccaccatcaacaatgagtacaactaccgctgctggaccacaaaccgctgccagaaaatgtgcccaagcacgtgtgggaagcgggcgtgcaccgagaacaatgagtgctgccaccccgagtgcctgggcagctgcagcgcgcctgacaacgacacggcctgtgtagcttgccgccactactactatgccggtgtctgtgtgcctgcctgcccgcctaacacctacaggtttgagggctggcgctgtgtggaccgtgacttctgcgccaacatcctcagcgccgagagcagcgactccgaggggtttgtgatccacgacggcgagtgcatgcaggagtgcccctcgggcttcatccgcaacggcagccagagcatgtactgcatcccttgtgaaggtccttgcccgaaggtctgtgaggaagaaaagaaaacaaagaccattgattctgttacttctgctcagatgctccaaggatgcaccatcttcaagggcaatttgctcattaacatccgacgggggaataacattgcttcagagctggagaacttcatggggctcatcgaggtggtgacgggctacgtgaagatccgccattctcatgccttggtctccttgtccttcctaaaaaaccttcgcctcatcctaggagaggagcagctagaagggaattactccttctacgtcctcgacaaccagaacttgcagcaactgtgggactgggaccaccgcaacctgaccatcaaagcagggaaaatgtactttgctttcaatcccaaattatgtgtttccgaaatttaccgcatggaggaagtgacggggactaaagggcgccaaagcaaaggggacataaacaccaggaacaacggggagagagcctcctgtgagagtgacgtcctgcatttcacctccaccaccacgtcgaagaatcgcatcatcataacctggcaccggtaccggccccctgactacagggatctcatcagcttcaccgtttactacaaggaagcaccctttaagaatgtcacagagtatgatgggcaggatgcctgcggctccaacagctggaacatggtggacgtggacctcccgcccaacaaggacgtggagcccggcatcttactacatgggctgaagccctggactcagtacgccgtttacgtcaaggctgtgaccctcaccatggtggagaacgaccatatccgtggggccaagagtgagatcttgtacattcgcaccaatgcttcagttccttccattcccttggacgttctttcagcatcgaactcctcttctcagttaatcgtgaagtggaaccctccctctctgcccaacggcaacctgagttactacattgtgcgctggcagcggcagcctcaggacggctacctttaccggcacaattactgctccaaagacaaaatccccatcaggaagtatgccgacggcaccatcgacattgaggaggtcacagagaaccccaagactgaggtgtgtggtggggagaaagggccttgctgcgcctgccccaaaactgaagccgagaagcaggccgagaaggaggaggctgaataccgcaaagtctttgagaatttcctgcacaactccatcttcgtgcccaggtacccagctcatgtgaaatttcagttggcaaaacccactgctcaggccggttctgttgcctttctccccaccaggtagtgtgtaagtcagcagctggggggtacaatacagtagcca

SEQ ID NO: 298 - protein, 759 aa, synthetic construct
  REGION 1..759: note = IGF1R/SR024A03 prot
MKSGSGGGSPTSLWGLLFLSAALSLWPTSGEICGPGIDIRNDYQQLKRLENCTVIEGYLHILLISKAEDYRSYRFPKLTVITEYLLLFRVAGLESLGDLFPNLTVIRGWKLFYNYALVIFEMTNLKDIGLYNLRNITRGAIRIEKNADLCYLSTVDWSLILDAVSNNYIVGNKPPKECGDLCPGTMEEKPMCEKTTINNEYNYRCWTTNRCQKMCPSTCGKRACTENNECCHPECLGSCSAPDNDTACVACRHYYYAGVCVPACPPNTYRFEGWRCVDRDFCANILSAESSDSEGFVIHDGECMQECPSGFIRNGSQSMYCIPCEGPCPKVCEEEKKTKTIDSVTSAQMLQGCTIFKGNLLINIRRGNNIASELENFMGLIEVVTGYVKIRHSHALVSLSFLKNLRLILGEEQLEGNYSFYVLDNQNLQQLWDWDHRNLTIKAGKMYFAFNPKLCVSEIYRMEEVTGTKGRQSKGDINTRNNGERASCESDVLHFTSTTTSKNRIIITWHRYRPPDYRDLISFTVYYKEAPFKNVTEYDGQDACGSNSWNMVDVDLPPNKDVEPGILLHGLKPWTQYAVYVKAVTLTMVENDHIRGAKSEILYIRTNASVPSIPLDVLSASNSSSQLIVKWNPPSLPNGNLSYYIVRWQRQPQDGYLYRHNYCSKDKIPIRKYADGTIDIEEVTENPKTEVCGGEKGPCCACPKTEAEKQAEKEEAEYRKVFENFLHNSIFVPRYPAHVKFQLAKPTAQAGSVAFLPTR

SEQ ID NO: 299 - DNA, 2708 bp, synthetic construct
  misc_feature 1..2708: note = IGF1R/SR024B04
  source 1..2708: mol_type = other DNA
atgaagtctggctccggaggagggtccccgacctcgctgtgggggctcctgtttctctccgccgcgctctcgctctggccgacgagtggagaaatctgcgggccaggcatcgacatccgcaacgactatcagcagctgaagcgcctggagaactgcacggtgatcgagggctacctccacatcctgctcatctccaaggccgaggactaccgcagctaccgcttccccaagctcacggtcattaccgagtacttgctgctgttccgagtggctggcctcgagagcctcggagacctcttccccaacctcacggtcatccgcggctggaaactcttctacaactacgccctggtcatcttcgaggtgaccaatctcaaggatattgggctttacaacctgaggaacattactcggggggccatcaggattgagaaaaatgctgacctctgttacctctccactgtggactggtccctgatcctggatgcggtgtccaataactacattgtggggaataagcccccaaaggaatgtggggacctgtgtccagggaccatggaggagaagccgatgtgtgagaagaccaccatcaacaatgagtacaactaccgctgctggaccacaaaccgctgccagaaaatgtgcccaagcacgtgtgggaagcgggcgtgcaccgagaacaatgagtgctgccaccccgagtgcctgggcagctgcagcgcgcctgacaacgacacggcctgtgtagcttgccgccactactactatgccggtgtctgtgtgcctgcctgcccgcccaacacctacaggtttgagggctggcgctgtgtggaccgtgacttctgcgccaacatcctcagcgccgagagcagcgactccgaggggtttgtgatccacgacggcgagtgcatgcaggagtgcccctcgggcttcatccgcaacggcagccagagcatgtactgcatcccttgtgaaggtccttgcccgaaggtctgtgaggaagaaaagaaaacaaagaccattgattctgttacttctgctcagatgctccaaggatgcaccatcttcaagggcaatttgctcattaacatccgacgggggaataacattgcttcagagctggagaacttcatggggctcatcgaggtggtgacgggctacgtgaagatccgccattctcatgccttggtctccttgtccttcctaaaaaaccttcgcctcatcctaggagaggagcagctagaagggaattactccttctacgtcctcgacaaccagaacttgcagcaactgtgggactgggaccaccgcaacctgaccatcaaagcagggaaaatgtactttgctttcaatcccaaattatgtgtttccgaaatttaccgcatggaggaagtgacggggactaaagggcgccaaagcaaaggggacataaacaccaggaacaacggggagagagcctcctgtgaaagtgacgtcctgcatttcacctccaccaccacgtcgaagaatcgcatcatcataacctggcaccggtaccggccccctgactacagggatctcatcagcttcaccgtttactacaaggaagcaccctttaagaatgtcacagagtatgatgggcaggatgcctgcggctccaacagctggaacatggtggacgtggacctcccgcccaacaaggacgtggagcccggcatcttactacatgggctgaagccctggactcagtacgccgtttacgtcaaggctgtgaccctcaccatggtggggaacgaccatatccgtggggccaagagtgagatcttgtacattcgcaccaatgcttcagttccttccattcccttggacgttctttcagcatcgaactcctcttctcagttaatcgtgaagtggaaccctccctctctgcccaacggcaacctgagttactacattgtgcgctggcagcggcagcctcaggacggctacctttaccggcacaattactgctccaaagacaaaatccccatcaggaagtatgccgacggcaccatcgacattgaggaggtcacagagaaccccaagactgaggtgtgtggtggggagaaagggccttgctgcgcctgccccaaaactgaagccgagaagcaggccgagaaggaggaggctgaataccgcaaagtctttgagaatttcctgcacaactccatcttcgtgcccagacctgaaaggaagcggagagatgtcatgcaagtggccaacaccaccatgtccagccgaagcaggaacaccacggccgcagacacctacaacatcaccgacccggaagagctggagacagagtaccctttctttgagagcagagtggatagcaaggagagaactgtcatttctaaccttcggcctttcacattgtaccgcatcgatatccacagctgcaaccacgaggctgagaagctgggctgcagcgcctccaacttcgtctttgcaaggactgtgcccgcaggtatggtatgatccagctggccccattgccaccttcctcacaacctagaatcacgaattctggatccgatacgtaacgcgtctgcagcatgcgtggtaccgagctttccctatagtgagtcgtattagagcttggcgtaatcatggtcatagctgtttcctgtgtgaaattgttatccgctcacaattccacacaacatacgagccggaagcataaagtgtaa

SEQ ID NO: 300 - protein, 831 aa, synthetic construct [sequence omitted]

SEQ ID NO: 301 - protein, 286 aa, Homo sapiens [sequence omitted]

SEQ ID NO: 302 - protein, 243 aa, Homo sapiens
  REGION 1..243: note = DDR1 SR005A10
MGPEALSSLLLLLLVASGDADMKGHFDPAKCRYALGMQDRTIPDSDISASSSWSDSTAARHSRLESSDGDGAWCPAGSVFPKEEEYLQVDLQRLHLVALVGTQGRHAGGLGKEFSRSYRLRYSRDGRRWMGWKDRWGQEVISGNEDPEGVVLKDLGPPMVARLVRFYPRADRVMSVCLRVELYGCLWRDCSMGVWASWQMVWWGWMTLGRVRSCGSGQAMTMWDGATTASPVAMWRWSLSLTG

SEQ ID NO: 303 - protein, 444 aa, Homo sapiens
  REGION 1..444: note = DDR1.h
MGPEALSSLLLLLLVASGDADMKGHFDPAKCRYALGMQDRTIPDSDISASSSWSDSTAARHSRLESSDGDGAWCPAGSVFPKEEEYLQVDLQRLHLVALVGTQGRHAGGLGKEFSRSYRLRYSRDGRRWMGWKDRWGQEVISGNEDPEGVVLKDLGPPMVARLVRFYPRADRVMSVCLRVELYGCLWRDGLLSYTAPVGQTMYLSEAVYLNDSTYDGHTVGGLQYGGLGQLADGVVGLDDFRKSQELRVWPGYDYVGWSNHSFSSGYVEMEFEFDRLRAFQAMQVHCNNMHTLGARLPGGVECRFRRGPAMAWEGEPMRHNLGGNLGDPRARAVSVPLGGRVARFLQCRFCPHLPRTASPIMPRLTLLPCRASPGATPMLCLHCPQGQSGMGPPEWISLDLDSASRRSLARASLGRCTCVRSTALKIWLVLISPLMCVRDTLCW

SEQ ID NO: 304 - protein, 474 aa, Homo sapiens
  REGION 1..474: note = EPHA1 SR004G03
MERRWPLGLGLVLLLCAPLPPGARAKEVTLMDTSKAQGELGWLLDPPKDGWSEQQQILNGTPLYMYQDCPMQGRRDTDHWLRSNWIYRGEEASRVHVELQFTVRDCKSFPGGAGPLGCKETFNLLYMESDQDVGIQLRRPLFQKVTTVAADQSFTIRDLVSGSVKLNVERCSLGRLTRRGLYLAFHNPGACVALVSVRVFYQRCPETLNGLAQFPDTLPGPAGLVEVAGTCLPHARASPRPSGAPRMHCSPDGEWLVPVGRCHCEPGYEEGGSGEACVACPSGSYRMDMDTPHCLTCPQQSTAESEGATICTCESGHYRAPGEGPQVACTGPPSAPRNLSFSASGTQLSLRWEPPADTGGRQDVRYSVRCSQCQGTAQDGGPCQPCGVGVHFSPGARGLTTPAVHVNGLEPYANYTFNVEAQNGVSGLGSSGHASTSVSISMGHAGERLRGAGTGTWWRQKGLRPQNKLMGRKP

SEQ ID NO: 305 - protein, 311 aa, Homo sapiens
  REGION 1..311: note = EPHA1 SR004G07
MERRWPLGLGLVLLLCAPLPPGARAKEVTLMDTSKAQGELGWLLDPPKDGWSEQQQILNGTPLYMYQDCPMQGRRDTDHWLRSNWIYRGEEASRVHVELQFTVRDCKSFPGGAGPLGCKETFNLLYMESDQDVGIQLRRPLFQKVTTVAADQSFTIRDLVSGSVKLNVERCSLGRLTRRGLYLAFHNPGACVALVSVRVFYQRCPETLNGLAQFPDTLPGPAGLVEVAGTCLPHARASPRPSGAPRMHCSPDGEWLVPVGRCHCEPGYEEGGSGEACVGKNGGGENLRNHSGGLQEYPGREGGQCSASVGF

SEQ ID NO: 306 - protein, 490 aa, Homo sapiens
  REGION 1..490: note = EPHA1 SR004H03
MERRWPLGLGLVLLLCAPLPPGARAKEVTLMDTSKAQGELGWLLDPPKDGWSEQQQILNGTPLYMYQDCPMQGRRDTDHWLRSNWIYRGEEASRVHVELQFTVRDCKSFPGGAGPLGCKETFNLLYMESDQDVGIQLRRPLFQKVTTVAADQSFTIRDLVSGSVKLNVERCSLGRLTRRGLYLAFHNPGACVALVSVRVFYQRCPETLNGLAQFPDTLPGPAGLVEVAGTCLPHARASPRPSGAPRMHCSPDGEWLVPVGRCHCEPGYEEGGSGEACVACPSGSYRMDMDTPHCLTCPQQSTAESEGATICTCESGHYRAPGEGPQVACTGPPSAPRNLSFSASGTQLSLRWEPPADTGGRQDVRYSVRCSQCQGTAQDGGPCQPCGVGVHFSPGARGLTTPAVHVNGLEPYANYTFNVEAQNGVSGLGSSGHASTSVSISMGHADPTLSLWTPRVTVRPVSETGEERTEATRADLGGVPAPKPWGEPDL

SEQ ID NO: 307 - protein, 166 aa, Homo sapiens
  REGION 1..166: note = EPHA1.b
MDTSKAQGELGWLLDPPKDGWSEQQQILNGTPLYMYQDCPMQGRRDTDHWLRSNWIYRGEEASRVHVELQFTVRDCKSFPGGAGPLGCKETFNLLYMESDQDVGIQLRRPLFQKVLLPSMPSGSWCRSLVAPYWVPEKVAETGRGCRGRILKRIWRLKAGHGGLCL

SEQ ID NO: 308 - protein, 497 aa, Homo sapiens
  REGION 1..497: note = EPHA2 SR016E12
MELQAARACFALLWGCALAAAAAAQGKEVVLLDFAAAGGELGWLTHPYGKGWDLMQNIMNDMPIYMYSVCNVMSGDQDNWLRTNWVYRGEAERIFIELKFTVRDCNSFPGGASSCKETFNLYYAESDLDYGTNFQKRLFTKIDTIAPDEITVSSDFEARHVKLNVEERSVGPLTRKGFYLAFQDIGACVALLSVRVYYEKCPEPLQGLAHFPETIAGSDAPSLATVAGTCVDHAVVPPGGEEPRMHCAVDGEWLVPIGQCLCQAGYEKVEDACQACSPGFFKFEASESPCLECPERTLPSPEGATSCECEEGFFRAPQDPASMPCTRPPSAPHYLTAVGMGAKVELRWTPPQDSGGREDIVYSVTCEQCWPESGECGPCEASVRYSEPPHGLTRTSVTVSDLEPHMNYTFTVEARNGVSGLVTSRSFRTASVSINQTEPPKVRLEGRSTTSLSVSWSIPPPQQSRVWKYEVTYRKKVTPRGAGLALAGPTAGDRLVT

SEQ ID NO: 309 - protein, 495 aa, Homo sapiens
  REGION 1..495: note = EPHA8.b
MAPARGRLPPALWVVTAAAAAATCVSAARGEVNLLDTSTIHGDWGWLTYPAHGWDSINEVDESFQPIHTYQVCNVMSPNQNNWLRTSWVPRDGARRVYAEIKFTLRDCNSMPGVLGTCKETFNLYYLESDRDLGASTQESQFLKIDTIAADESFTGADLGVRRLKLNTEVRSVGPLSKRGFYLAFQDIGACLAILSLRIYYKKCPAMVRNLAAFSEAVTGADSSSLVEVRGQCVRHSEERDTPKMYCSAEGEWLVPIGKCVCSAGYEERRDACVACELGFYKSAPGDQLCARCPPHSHSAAPAAQACHCDLSYYRAALDPPSSACTRPPSAPVNLISSVNGTSVTLEWAPPLDPGGRSDITYNAVCRRCPWALSRCEACGSGTRFVPQQTSLVQASLLVANLLAHMNYSFWIEAVNGVSDLSPEPRRAAVVNITTNQAGRRRNSVPQRPGPPASPASDPSRDQSSAGDVLWAFRQVPLWPCAPHQDPELEALHCL

SEQ ID NO: 310 - protein, 242 aa, Homo sapiens
  REGION 1..242: note = EPHB1 SR005D06
MALDYLLLLLLASAVAAMEETLMDTRTATAELGWTANPASGWEEVSGYDENLNTIRTYQVCNVFEPNQNNWLLTTFINRRGAHRIYTEMRFTVRDCSSLPNVPGSCKETFNLYYYETDSVIATKKSAFWSEAPYLKVDTIAADESFSQVDFGGRLMKLALQGHSRPARKLKAAPTAPPTAAPLQRRLPSAPVGPVITERTLTLQKWHALASHQVPAMLSPSSMRRPSFWSGTLQGRQVGGMM

SEQ ID NO: 311 - protein, 306 aa, Homo sapiens
  REGION 1..306: note = EPHB4 SR012C08
MELRVLLCWASLAAALEETLLNTKLETADLKWVTFPQVDGQWEELSGLDEEQHSVRTYEVCDVQRAPGQAHWLRTGWVPRRGAVHVYATLRFTMLECLSLPRAGRSCKETFTVFYYESDADTATALTPAWMENPYIKVDTVAAEHLTRKRPGAEATGKVNVKTLRLGPLSKAGFYLAFQDQGACMALLSLHLFYKKCAQLTVNLTRFPETVPRELVVPVAGSCVVDAVPAPGPSPSLYCREDGQWAEQPVTGCSCAPGFEAAEGNTKCRGRRGSQQRAVPEDVRKPGRAAGAEAGSQLPGAGTGAL

SEQ ID NO: 312 - protein, 516 aa, Homo sapiens
  REGION 1..516: note = EPHB4 SR012D11
MELRVLLCWASLAAALEETLLNTKLETADLKWVTFPQVDGQWEELSGLDEEQHSVRTYEVCDVQRAPGQAHWLRTGWVPRRGAVHVYATLRFTMLECLSLPRAGRSCKETFTVFYYESDADTATALTPAWMENPYIKVDTVAAEHLTRKRPGAEATGKVNVKTLRLGPLSKAGFYLAFQDQGACMALLSLHLFYKKCAQLTVNLTRFPETVPRELVVPVAGSCVVDAVPAPGPSPSLYCREDGQWAEQPVTGCSCAPGFEAAEGNTKCRACAQGTFKPLSGEGSCQPCPANSHSNTIGSAVCQCRVGYFRARTDPRGAPCTTPPSAPRSVVSRLNGSSLHLEWSAPLESGGREDLTYALRCRECRPGGSCAPCGGDLTFDPGPRDLVEPWVVVRGLRPDFTYTFEVTALNGVSSLATGPVPFEPVNVTTDREVPPAVSDIRVTRSSPSSLSLAWAVPRAPSGAVLDYEVKYHEKGAEGPSSVRFLKTSENRAELRGLKRGASYLVQRARAGGSSWP

SEQ ID NO: 313 - protein, 414 aa, Homo sapiens
  REGION 1..414: note = EPHB4 SR012E11
MELRVLLCWASLAAALEETLLNTKLETADLKWVTFPQVDGQWEELSGLDEEQHSVRTYEVCDVQRAPGQAHWLRTGWVPRRGAVHVYATLRFTMLECLSLPRAGRSCKETFTVFYYESDADTATALTPAWMENPYIKVDTVAAEHLTRKRPGAEATGKVNVKTLRLGPLSKAGFYLAFQDQGACMALLSLHLFYKKCAQLTVNLTRFPETVPRELVVPVAGSCVVDAVPAPGPSPSLYCREDGQWAEQPVTGCSCAPGFEAAEGNTKCRACAQGTFKPLSGEGSCQPCPANSHSNTIGSAVCQCRVGYFRARTDPRGAPCTTPPSAPRSVVSRLNGSSLHLEWSAPLESGGREDLTYALRCRECRPGGSCAPCGGDLTFDPGPRDLVEPWVVVRGLRPDFTYTFEYLLQCLTSG

SEQ ID NO: 314 - protein, 228 aa, Homo sapiens
  REGION 1..228: note = FGFR1 SR001E12
MWSWKCLLFWAVLVTATLCTARPSPTLPEQDALPSSEDDDDDDDSSSEEKETDNTKPNPVAPYWTSPEKMEKKLHAVPAAKTVKFKCPSSGTPNPTLRWLKNGKEFKPDHRIGGYKVRYATWSIIMDSVVPSDKGNYTCIVENEYGSINHTYQLDVVERSPHRPILQAGLPANKTVALGSNVEFMCKVYSDPQPHIQWLKHIEVNGSKIGPDNLPYVQILKPWKRGRQ

SEQ ID NO: 315 - protein, 320 aa, Homo sapiens [sequence omitted]

SEQ ID NO: 316 - protein, 266 aa, Homo sapiens [sequence omitted]

SEQ ID NO: 317 - protein, 317 aa, Homo sapiens
  REGION 1..317: note = FGFR2 SR022C11
MVSWGRFICLVVVTMATLSLARPSFSLVEDTTLEPEEPPTKYQISQPEVYVAAPGESLEVRCLLKDAAVISWTKDGVHLGPNNRTVLIGEYLQIKGATPRDSGLYACTASRTVDSETWYFMVNVTDAISSGDDEDDTDGAEDFVSENSNNKRAPYWTNTEKMEKRLHAVPAANTVKFRCPAGGNPMPTMRWLKNGKEFKQEHRIGGYKVRNQHWSLIMESVVPSDKGNYTCVVENEYGSINHTYHLDVVERSPHRPILQAGLPANASTVVGGDVEFVCKVYSDAQPHIQWIKHVEKNGSKYGPDGLPYLKVLKVRTF

SEQ ID NO: 318 - protein, 281 aa, Homo sapiens [sequence omitted]

SEQ ID NO: 319 - protein, 396 aa, Homo sapiens [sequence omitted]

SEQ ID NO: 320 - protein, 366 aa, synthetic construct
  REGION 1..366: note = FGFR2.b BUILD 31
MVSWGRFICLVVVTMATLSLARPSFSLVEDTTLEPEEPPTKYQISQPEVYVAAPGESLEVRCLLKDAAVISWTKDGVHLGPNNRTVLIGEYLQIKGATPRDSGLYACTASRTVDSETWYFMVNVTDAISSGDDEDDTDGAEDFVSENSNNKRAPYWTNTEKMEKRLHAVPAANTVKFRCPAGGNPMPTMRWLKNGKEFKQEHRIGGYKVRNQHWSLIMESVVPSDKGNYTCVVENEYGSINHTYHLDVVERSPHRPILQAGLPANASTVVGGDVEFVCKVYSDAQPHIQWIKHVEKNGSKYGPDGLPYLKVLKHSGINSSNAEVLALFNVTEADAGEYICKVSNYIGQANQSAWLTVLPKQQGRRC

SEQ ID NO: 321 - protein, 72 aa, Homo sapiens
  REGION 1..72: note = FGFR4 SR002A11
MRLLLALLGVLLSVPGPPVLSLEASEEVELASIHLSLCLRERTGLAGRRALSWAAELVSPAWLPAWSSKSRS

SEQ ID NO: 322 - protein, 446 aa, Homo sapiens
  REGION 1..446: note = FGFR4 SR002A10
MRLLLALLGVLLSVPGPPVLSLEASEEVELEPCLAPSLEQQEQELTVALGQPVRLCCGRAERGGHWYKEGSRLAPAGRVRGWRGRLEIASFLPEDAGRYLCLARGSMIVLQNLTLITGDSLTSSNDDEDPKSHRDPSNRHSYPQQAPYWTHPQRMEKKLHAVPAGNTVKFRCPAAGNPTPTIRWLKDGQAFHGENRIGGIRLRHQHWSLVMESVVPSDRGTYTCLVENAVGSIRYNYLLDVLERSPHRPILQAGLPANTTAVVGSDVELLCKVYSDAQPHIQWLKHIVINGSSFGADGFPYVQVLKTADINSSEVEVLYLRNVSAEDAGEYTCLAGNSIGLSYQSAWLTVLPGEHLKGQEMLRDAPLGQQWGLWPVGWSVSVGLWGLAWGAVCGFVGLSCMTAPLCLSTRGRPCDRLLRCGCLGLGITTASSVCVPTYVGSWEGLS

SEQ ID NO: 323 - protein, 209 aa, Homo sapiens
  REGION 1..209: note = FGFR4.d BUILD 31
MMRTPSPIGTPRIGTVTPSKVSRSPRTCVPAAAHLITEKRRPVWEHTVILGAFPCPPAPYWTHPQRMEKKLHAVPAGNTVKFRCPAAGNPTPTIRWLKDGQAFHGENRIGGIRLRHQHWSLVMESVVPSDRGTYTCLVENAVGSIRYNYLLDVLERSPHRPILQAGLPANTTAVVGSDVELLCKVYSDAQPHIQWLKHIVINGSSFGAD

SEQ ID NO: 324 - protein, 413 aa, Homo sapiens [sequence omitted]

SEQ ID NO: 325 - protein, 468 aa, Homo sapiens [sequence omitted]

SEQ ID NO: 326 - protein, 518 aa, Homo sapiens [sequence omitted]

SEQ ID NO: 327 - protein, 596 aa, Homo sapiens [sequence omitted]

SEQ ID NO: 328 - protein, 408 aa, Homo sapiens [sequence omitted]

SEQ ID NO: 329 - protein, 621 aa, Homo sapiens [sequence omitted]

SEQ ID NO: 330 - protein, 664 aa, Homo sapiens [sequence omitted]

SEQ ID NO: 331 - protein, 719 aa, Homo sapiens [sequence omitted]

SEQ ID NO: 332 - protein, 697 aa, Homo sapiens [sequence omitted]

SEQ ID NO: 333 - protein, 691 aa, Homo sapiens [sequence omitted]

SEQ ID NO: 334 - protein, 661 aa, Homo sapiens [sequence omitted]

SEQ ID NO: 335 - protein, 755 aa, Homo sapiens [sequence omitted]

SEQ ID NO: 336 - protein, 823 aa, Homo sapiens [sequence omitted]

SEQ ID NO: 337 - protein, 877 aa, Homo sapiens [sequence omitted]

SEQ ID NO: 338 - protein, 764 aa, Homo sapiens [sequence omitted]

SEQ ID NO: 339 - protein, 934 aa, Homo sapiens
  REGION 1..934: note = MET 34
MKAPAVLAPGILVLLFTLVQRSNGECKEALAKSEMNVNMKYQLPNFTAETPIQNVILHEHHIFLGATNYIYVLNEEDLQKVAEYKTGPVLEHPDCFPCQDCSSKANLSGGVWKDNINMALVVDTYYDDQLISCGSVNRGTCQRHVFPHNHTADIQSEVHCIFSPQIEEPSQCPDCVVSALGAKVLSSVKDRFINFFVGNTINSSYFPDHPLHSISVRRLKETKDGFMFLTDQSYIDVLPEFRDSYPIKYVHAFESNNFIYFLTVQRETLDAQTFHTRIIRFCSINSGLHSYMEMPLECILTEKRKKRSTKKEVFNILQAAYVSKPGAQLARQIGASLNDDILFGVFAQSKPDSAEPMDRSAMCAFPIKYVNDFFNKIVNKNNVRCLQHFYGPNHEHCFNRTLLRNSSGCEARRDEYRTEFTTALQRVDLFMGQFSEVLLTSISTFIKGDLTIANLGTSEGRFMQVVVSRSGPSTPHVNFLLDSHPVSPEVIVEHTLNQNGYTLVITGKKITKIPLNGLGCRHFQSCSQCLSAPPFVQCGWCHDKCVRSEECLSGTWTQQICLPAIYKVFPNSAPLEGGTRLTICGWDFGFRRNNKFDLKKTRVLLGNESCTLTLSESTMNTLKCTVGPAMNKHFNMSIIISNGHGTTQYSTFSYVDPVITSISPKYGPMAGGTLLTLTGNYLNSGNSRHISIGGKTCTLKSVSNSILECYTPAQTISTEFAVKLKIDLANRETSIFSYREDPIVYEIHPTKSFISGGSTITGVGKNLNSVSVPRMVINVHEAGRNFTVACQHRSNSEIICCTTPSLQQLNLQLPLKTKAFFMLDGILSKYFDLIYVHNPVFKPFEKPVMISMGNENVLEIKGNDIDPEAVKGEVLKVGNKSCENIHLHSEAVLCTVPNDLLKLNSELNIEVGFLHSSHDVNKEASVIMLFSGLK

SEQ ID NO: 340 - protein, 541 aa, Homo sapiens
  REGION 1..541: note = RON SR014C01
MELLPPLPQSFLLLLLLPAKPAAGEDWQCPRTPYAASRDFDVKYVVPSFSAGGLVQAMVTYEGDRNESAVFVAIRNRLHVLGPDLKSVQSLATGPAGDPGCQTCAACGPGPHGPPGDTDTKVLVLDPALPALVSCGSSLQGRCFLHDLEPQGTAVHLAAPACLFSAHHNRPDDCPDCVASPLGTRVTVVEQGQASYFYVASSLDAAVAASFSPRSVSIRRLKADASGFAPGFVALSVLPKHLVSYSIEYVHSFHTGAFVYFLTVQPASVTDDPSALHTRLARLSATEPELGDYRELVLDCRFAPKRRRRGAPEGGQPYPVLRVAHSAPVGAQLATELSIAEGQEVLFGVFVTGKDGGPGVGPNSVVCAFPIDLLDTLIDEGVERCCESPVHPGLRRGLDFFQSPSFCPNPVFQVPIQGPGCRHFLTCGRCLRAWHFMGCGWCGNMCGQQKECPGSWQQDHCPPKLTEFHPHSGPLRGSTRLTLCGSNFYLHPSGLVPEGTHQVTVGQSPCRPLPKDSSKLRYNLVPPLPFPEGGNQAAPSP

SEQ ID NO: 341 - protein, 908 aa, Homo sapiens
  REGION 1..908: note = RON SR014C09
MELLPPLPQSFLLLLLLPAKPAAGEDWQCPRTPYAASRDFDVKYVVPSFSAGGLVQAMVTYEGDRNESAVFVAIRNRLHVLGPDLKSVQSLATGPAGDPGCQTCAACGPGPHGPPGDTDTKVLVLDPALPALVSCGSSLQGRCFLHDLEPQGTAVHLAAPACLFSAHHNRPDDCPDCVASPLGTRVTVVEQGQASYFYVASSLDAAVAASFSPRSVSIRRLKADASGFAPGFVALSVLPKHLVSYSIEYVHSFHTGAFVYFLTVQPASVTDDPSALHTRLARLSATEPELGDYRELVLDCRFAPKRRRRGAPEGGQPYPVLRVAHSAPVGAQLATELSIAEGQEVLFGVFVTGKDGGPGVGPNSVVCAFPIDLLDTLIDEGVERCCESPVHPGLRRGLDFFQSPSFCPNPPGLEALSPNTSCRHFPLLVSSSFSRVDLFNGLLGPVQVTALYVTRLDNVTVAHMGTMDGRILQVELVRSLNYLLYVSNFSLGDSGQPVQRDVSRLGDHLLFASGDQVFQVPIQGPGCRHFLTCGRCLRAWHFMGCGWCGNMCGQQKECPGSWQQDHCPPKLTEFHPHSGPLRGSTRLTLCGSNFYLHPSGLVPEGTHQVTVGQSPCRPLPKDSSKLRPVPRKDFVEEFECELEPLGTQAVGPTNVSLTVTNMPPGKHFRVDGTSVLRGFSFMEPVLIAVQPLFGPRAGGTCLTLEGQSLSVGTSRAVLVNGTECLLARVSEGQLLCATPPGATVASVPLSLQVGGAQVPGSWTFQYREDPVVLSISPNCGYINSHITICGQHLTSAWHLVLSFHDGLRAVESRQCERQLPEQQLCRLPEYVVRDPQGWVAGNLSARGDGAAGFTLPGFRFLPPPHPPSANLVPLKPEEHAIKFEVSVRDRGRDSWGSESRGQPTGWSS

SEQ ID NO: 342 - protein, 647 aa, Homo sapiens
  REGION 1..647: note = RON SR014E12
MELLPPLPQSFLLLLLLPAKPAAGEDWQCPRTPYAASRDFDVKYVVPSFSAGGLVQAMVTYEGDRNESAVFVAIRNRLHVLGPDLKSVQSLATGPAGDPGCQTCAACGPGPHGPPGDTDTKVLVLDPALPALVSCGSSLQGRCFLHDLEPQGTAVHLAAPACLFSAHHNRPDDCPDCVASPLGTRVTVVEQGQASYFYVASSLDAAVAASFSPRSVSIRRLKADASGFAPGFVALSVLPKHLVSYSIEYVHSFHTGAFVYFLTVQPASVTDDPSALHTRLARLSATEPELGDYRELVLDCRFAPKRRRRGAPEGGQPYPVLRVAHSAPVGAQLATELSIAEGQEVLFGVFVTGKDGGPGVGPNSVVCAFPIDLLDTLIDEGVERCCESPVHPGLRRGLDFFQSPSFCPNPPGLEALSPNTSCRHFPLLVSSSFSRVDLFNGLLGPVQVTALYVTRLDNVTVAHMGTMDGRILQVELVRSLNYLLYVSNFSLGDSGQPVQRDVSRLGDHLLFASGDQVFQVPIQGPGCRHFLTCGRCLRAWHFMGCGWCGNMCGQQKECPGSWQQDHCPPKLTEFHPHSGPLRGSTRLTLCGSNFYLHPSGLVPEGTHQVTVGQSPCRPLPKDSSKLRYNLVPPLPFPEGGNQAAPSP

SEQ ID NO: 343 - protein, 495 aa, Homo sapiens
  REGION 1..495: note = RON SR004C11
MELLPPLPQSFLLLLLLPAKPAAGEDWQCPRTPYAASRDFDVKYVVPSFSAGGLVQAMVTYEGDRNESAVFVAIRNRLHVLGPDLKSVQSLATGPAGDPGCQTCAACGPGPHGPPGDTDTKVLVLDPALPALVSCGSSLQGRCFLHDLEPQGTAVHLAAPACLFSAHHNRPDDCPDCVASPLGTRVTVVEQGQASYFYVASSLDAAVAASFSPRSVSIRRLKADASGFAPGFVALSVLPKHLVSYSIEYVHSFHTGAFVYFLTVQPASVTDDPSALHTRLARLSATEPELGDYRELVLDCRFAPKRRRRGAPEGGQPYPVLRVAHSAPVGAQLATELSIAEGQEVLFGVFVTGKDGGPGVGPNSVVCAFPIDLLDTLIDEGVERCCESPVHPGLRRGLDFFQSPSFCPNPPGLEALSPNTSCRHFPLLVSSSFSRVDLFNGLLGPVQVTALYVTRLDNVTVAHMGTMDGRILQVGPHPHSPLALGPCLHPHFAHI

SEQ ID NO: 344 - protein, 306 aa, Homo sapiens
  REGION 1..306: note = CSF1R SR005A06
MGPGVLLLLLVATAWHGQGIPVIEPSVPELVVKPGATVTLRCVGNGSVEWDGPPSPHWTLYSDGSSSILSTNNATFQNTGTYRCTEPGDPLGGSAAIHLYVKDPARPWNVLAQEVVVFEDQDALLPCLLTDPVLEAGVSLVRVRGRPLMRHTNYSFSPWHGFTIHRAKFIQSQDYQCSALMGGRKVMSISIRLKVQKVIPGPPALTLVPAELVRIRGEAAQIVCSASSVDVNFDVFLQHNNTKLAIPQQSDFHNNRYQKVLTLNLDQVDFQHAGNYSCVASNVQGKHSTSMFFRVVGTPSPSLCPA

SEQ ID NO: 345 - protein, 413 aa, Homo sapiens
  REGION 1..413: note = KIT SR002H01
MRGARGAWDFLCVLLLLLRVQTGSSQPSVSPGEPSPPSIHPGKSDLIVRVGDEIRLLCTDPGFVKWTFEILDETNENKQNEWITEKAEATNTGKYTCTNKHGLSNSIYVFVRDPAKLFLVDRSLYGKEDNDTLVRCPLTDPEVTNYSLKGCQGKPLPKDLRFIPDPKAGIMIKSVKRAYHRLCLHCSVDQEGKSVLSEKFILKVRPAFKAVPVVSVSKASYLLREGEEFTVTCTIKDVSSSVYSTWKRENSQTKLQEKYNSWHHGDFNYERQATLTISSARVNDSGVFMCYANNTFGSANVTTTLEVVDKGFINIFPMINTTVFVNDGENVDLIVEYEAFPKPEHQQWIYMNRTFTDKWEDYPKSENESNIRYVSELHLTRLKGTEGGTYTFLVSNSDVNAAIAFNVYVNTSL

SEQ ID NO: 346 - protein, 217 aa, Homo sapiens
  REGION 1..217: note = PDGFRA.b BUILD 31
MGTSHPAFLVLGCLLTGLSLILCQLSLPSILPNENEKVVQLNSSFSLRCFGESEVSWQYPMSEEESSDVEIRNEENNSGLFVTVLEVSSASAAHTGLYTCYYNHTQTEENELEGRHIYIYVPDPDVAFVPLGMTDYLVIVEDDDSAIIPCRTTDPETPVTLHNSEGVVPASYDSRQGFNGTFTVGPYICEATVKGKKFQTIPFNVYALKGTCIISFL

SEQ ID NO: 347 - protein, 218 aa, synthetic construct
  REGION 1..218: note = PDGFRA.c BUILD 34
MGTSHPAFLVLGCLLTGLSLILCQLSLPSILPNENEKVVQLNSSFSLRCFGESEVSWQYPMSEEESSDVEIRNEENNSGLFVTVLEVSSASAAHTGLYTCYYNHTQTEENELEGRHIYIYVPDPDVAFVPLGMTDYLVIVEDDDSAIIPCRTTDPETPVTLHNSEGVVPASYDSRQGFNGTFTVGPYICEATVKGKKFQTIPFNVYALKGTCIISFLL

SEQ ID NO: 348 - protein, 336 aa, Homo sapiens
  REGION 1..336: note = PDGFRB SR007C09
MRLPGAMPALALKGELLLLSLLLLLEPQISQGLVVTPPGPELVLNVSSTFVLTCSGSAPVVWERMSQEPPQEMAKAQDGTFSSVLTLTNLTGLDTGEYFCTHNDSRGLETDERKRLYIFVPDPTVGFLPNDAEELFIFLTEITEITIPCRVTDPQLVVTLHEKKGDVALPVPYDHQRGFSGIFEDRSYICKTTIGDREVDSDAYYVYRLQVSSINVSVNAVQTVVRQGENITLMCIVIGNEVVNFEWTYPRKESGRLVEPVTDFLLDMPYHIRSILHIPSAELEDSGTYTCNVTESVNDHQDEKAINITVRAATCGSWERWAHYNLLSCIGAGHCR

SEQ ID NO: 349 - protein, 367 aa, Homo sapiens
  REGION 1..367: note = TEK SR007G02
MDSLASLVLCGVSLLLSGTVEGAMDLILINSLPLVSDAETSLTCIASGWRPHEPITIGRDFEALMNQHQDPLEVTQDVTREWAKKVVWKREKASKINGAYFCEGRVRGEAIRIRTMKMRQQASFLPATLTMTVDKGDNVNISFKKVLIKEEDAVIYKNGSFIHSVPRHEVPDILEVHLPHAQPQDAGVYSARYIGGNLFTSAFTRLIVRRCEAQKWGPECNHLCTACMNNGVCHEDTGECICPPGFMGRTCEKACELHTFGRTCKERCSGQEGCKSYVFCLPDPYGCSCATGWKGLQCNEACHPGFYGPDCKLRCSCNNGEMCDRFQGCLCSPGWQGLQCEREGKARHTEDDPKDSGFARSYRSKQW

SEQ ID NO: 350 - protein, 468 aa, Homo sapiens
  REGION 1..468: note = TEK SR007H03
MDSLASLVLCGVSLLLSGTVEGAMDLILINSLPLVSDAETSLTCIASGWRPHEPITIGRDFEALMNQHQDPLEVTQDVTREWAKKVVWKREKASKINGAYFCEGRVRGEAIRIRTMKMRQQASFLPATLTMTVDKGDNVNISFKKVLIKEEDAVIYKNGSFIHSVPRHEVPDILEVHLPHAQPQDAGVYSARYIGGNLFTSAFTRLIVRRCEAQKWGPECNHLCTACMNNGVCHEDTGECICPPGFMGRTCEKACELHTFGRTCKERCSGQEGCKSYVFCLPDPYGCSCATGWKGLQCNEGIQRMTPKIVDLPDHIEVNSGKFNPICKASGWPLPTNEEMTLVKPDGTVLHPKDFNHTDHFSVAIFTIHRILPPDSGVWVCSVNTVAGMVEKPFNISVKVLPKPLNAPNVIDTGHNFAVINISSEPYFGDGPIKSKKLLYKPVNHYEAWQHIQVSMEKQRLTKANSDK

SEQ ID NO: 351 - protein, 864 aa, Homo sapiens
  REGION 1..864: note = TEKc
MDSLASLVLCGVSLLLSGTVEGAMDLILINSLPLVSDAETSLTCIASGWRPHEPITIGRDFEALMNQHQDPLEVTQDVTREWAKKVVWKREKASKINGAYFCEGRVRGEAIRIRTMKMRQQASFLPATLTMTVDKGDNVNISFKKVLIKEEDAVIYKNGSFIHSVPRHEVPDILEVHLPHAQPQDAGVYSARYIGGNLFTSAFTRLIVRRCEAQKWGPECNHLCTACMNNGVCHEDTGECICPPGFMGRTCEKACELHTFGRTCKERCSGQEGCKSYVFCLPDPYGCSCATGWKGLQCNEACHPGFYGPDCKLRCSCNNGEMCDRFQGCLCSPGWQGLQCEREGIQRMTPKIVDLPDHIEVNSGKFNPICKASGWPLPTNEEMTLVKPDGTVLHPKDFNHTDHFSVAIFTIHRILPPDSGVWVCSVNTVAGMVEKPFNISVKVLPKPLNAPNVIDTGHNFAVINISSEPYFGDGPIKSKKLLYKPVNHYEAWQHIQVTNEIVTLNYLEPRTEYELCVQLVRRGEGGEGHPGPVRRFTTASIGLPPPRGLNLLPKSQTTLNLTWQPSSEDDFYVEVERRSVQKSDQQNIKVPGNLTSVLLNNLHPREQYVVRARVNTKAQGEWSEDLTAWTLSDILPPQPENIKISNITHSSAVISWTILDGYSISSITIRYKVQGKNEDQHVDVKIKNATITQYQLKGLEPETAYQVDIFAENNIGSSNPAFSHELVTLPESQAPADLGGGKMLLIAILGSAGMTCLTVLLAFLIILQLKRANVQRRMAQAFQNVREEPAVQFNSGTLALNRKVKNNPDPTIYPVLDWNDIKFQDVIGEGNFGQVLKARIKKDGLRMDAAIKRMKEYASKDDHR

SEQ ID NO: 352 - protein, 798 aa, Homo sapiens
  REGION 1..798: note = TEKc 31
MDLILINSLPLVSDAETSLTCIASGWRPHEPITIGRDFEALMNQHQDPLEVTQDVTREWAKKVVWKREKASKINGAYFCEGRVRGEAIRIRTMKMRQQASFLPATLTMTVDKGDNVNISFKKVLIKEEDAVIYKNGSFIHSVPRHEVPDILEVHLPHAQPQDAGVYSARYIGGNLFTSAFTRLIVRRCEAQKWGPECNHLCTACMNNGVCHEDTGECICPPGFMGRTCEKACELHTFGRTCKERCSGQEGCKSYVFCLPDPYGCSCATGWKGLQCNEGIQRMTPKIVDLPDHIEVNSGKFNPICKASGWPLPTNEEMTLVKPDGTVLHPKDFNHTDHFSVAIFTIHRILPPDSGVWVCSVNTVAGMVEKPFNISVKVLPKPLNAPNVIDTGHNFAVINISSEPYFGDGPIKSKKLLYKPVNHYEAWQHIQVTNEIVTLNYLEPRTEYELCVQLVRRGEGGEGHPGPVRRFTTASIGLPPPRGLNLLPKSQTTLNLTWQPSSEDDFYVEVERRSVQKSDQQNIKVPGNLTSVLLNNLHPREQYVVRARVNTKAQGEWSEDLTAWTLSDILPPQPENIKISNITHSSAVISWTILDGYSISSITIRYKVQGKNEDQHVDVKIKNATITQYQLKGLEPETAYQVDIFAENNIGSSNPAFSHELVTLPESQAPADLGGGKMLLIAILGSAGMTCLTVLLAFLIILQLKRANVQRRMAQAFQNVREEPAVQFNSGTLALNRKVKNNPDPTIYPVLDWNDIKFQDVIGEGNFGQVLKARIKKDGLRMDAAIKRMKEYASKDDHR

SEQ ID NO: 353 - protein, 821 aa, Homo sapiens
  REGION 1..821: note = TEKc 34
MDSLASLVLCGVSLLLSGTVEGAMDLILINSLPLVSDAETSLTCIASGWRPHEPITIGRDFEALMNQHQDPLEVTQDVTREWAKKVVWKREKASKINGAYFCEGRVRGEAIRIRTMKMRQQASFLPATLTMTVDKGDNVNISFKKVLIKEEDAVIYKNGSFIHSVPRHEVPDILEVHLPHAQPQDAGVYSARYIGGNLFTSAFTRLIVRRCEAQKWGPECNHLCTACMNNGVCHEDTGECICPPGFMGRTCEKACELHTFGRTCKERCSGQEGCKSYVFCLPDPYGCSCATGWKGLQCNEGIQRMTPKIVDLPDHIEVNSGKFNPICKASGWPLPTNEEMTLVKPDGTVLHPKDFNHTDHFSVAIFTIHRILPPDSGVWVCSVNTVAGMVEKPFNISVKVLPKPLNAPNVIDTGHNFAVINISSEPYFGDGPIKSKKLLYKPVNHYEAWQHIQVTNEIVTLNYLEPRTEYELCVQLVRRGEGGEGHPGPVRRFTTASIGLPPPRGLNLLPKSQTTLNLTWQPSSEDDFYVEVERRSVQKSDQQNIKVPGNLTSVLLNNLHPREQYVVRARVNTKAQGEWSEDLTAWTLSDILPPQPENIKISNITHSSAVISWTILDGYSISSITIRYKVQGKNEDQHVDVKIKNATITQYQLKGLEPETAYQVDIFAENNIGSSNPAFSHELVTLPESQAPADLGGGKMLLIAILGSAGMTCLTVLLAFLIILQLKRANVQRRMAQAFQNVREEPAVQFNSGTLALNRKVKNNPDPTIYPVLDWNDIKFQDVIGEGNFGQVLKARIKKDGLRMDAAIKRMKEYASKDDHR

SEQ ID NO: 354 - protein, 786 aa, Homo sapiens
  REGION 1..786: note = TIE isoform
MVWRVPPFLLPILFLASHVGAAVDLTLLANLRLTDPQRFFLTCVSGEAGAGRGSDAWGPPLLLEKDDRIVRTPPGPPLRLARNGSHQVTLRGFSKPSDLVGVFSCVGGAGARRTRVIYVHNSPGAHLLPDKVTHTVNKGDTAVLSARVHKEKQTDVIWKSNGSYFYTLDWHEAQDGRFLLQLPNVQPPSSGIYSATYLEASPLGSAFFRLIVRGCGAGRWGPGCTKECPGCLHGGVCHDHDGECVCPPGFTGTRCEQACREGRFGQSCQEQCPGISGCRGLTFCLPDPYGCSCGSGWRGSQCQEACAPGHFGADCRLQCQCQNGGTCDRFSGCVCPSGWHGVHCEKSDRIPQILNMASELEFNLETMPRINCAAAGNPFPVRGSIELRKPDGTVLLSTKAIVEPEKTTAEFEVPRLVLADSGFWECRVSTSGGQDSRRFKVNVKVPPVPLAAPRLLTKQSRQLVVSPLVSFSGDGPISTVRLHYRPQDSTMDWSTIVVDPSENVTLMNLRPKTGYSVRVQLSRPGEGGEGAWGPPTLMTTDCPEPLLQPWLEGWHVEGTDRLRVSWSLPLVPGPLVGDGFLLRLWDGTRGQERRENVSSPQARTALLTGLTPGTHYQLDVQLYHCTLLGPASPPAHVLLPPSGPPAPRHLHAQALSDSEIQLTWKHPEALPGPISKYVVEVQVAGGAGDPLWIDVDRPEETSTIIRGLNASTRYLFRMRASIQGLGDWSNTVEESTLGNGLQAEGPVQESRAAEEGLDQQLILAVVGSVSATCLTILAALLTLVCI

SEQ ID NO: 355 - protein, 251 aa, Homo sapiens
  REGION 1..251: note = TIE SR006A04
MVWRVPPFLLPILFLASHVGAAVDLTLLANLRLTDPQRFFLTCVSGEAGAGRGSDAWGPPLLLEKDDRIVRTPPGPPLRLARNGSHQVTLRGFSKPSDLVGVFSCVGGAGARRTRVIYVHNSPGAHLLPDKVTHTVNKGDTAVLSARVHKEKQTDVIWKSNGSYFYTLDWHEAQDGRFLLQLPNVQPPSSGIYSATYLEASPLGSAFFRLIVRGQRQRAEVVGRVGGWEPYGYFLWVPWSPWISSPQWSGG

SEQ ID NO: 356 - protein, 379 aa, Homo sapiens
  REGION 1..379: note = TIE SR006B07
MVWRVPPFLLPILFLASHVGAAVDLTLLANLRLTDPQRFFLTCVSGEAGAGRGSDAWGPPLLLEKDDRIVRTPPGPPLRLARNGSHQVTLRGFSKPSDLVGVFSCVGGAGARRTRVIYVHNSPGAHLLPDKVTHTVNKGDTAVLSARVHKEKQTDVIWKSNGSYFYTLDWHEAQDGRFLLQLPNVQPPSSGIYSATYLEASPLGSAFFRLIVRGCGAGRWGPGCTKECPGCLHGGVCHDHDGECVCPPGFTGTRCEQACREGRFGQSCQEQCPGISGCRGLTFCLPDPYGCSCGSGWRGSQCQEACAPGHFGADCRLQCQCQNGGTCDRFSGCVCPSGWHGVHCEKSGWRDWVDTSTEKQNTDEGRFGGHVSAPVGAPG

SEQ ID NO: 357 - protein, 161 aa, Homo sapiens
  REGION 1..161: note = TIE SR006B06
MVWRVPPFLLPILFLASHVGAAVDLTLLANLRLTDPQRFFLTCVSGEAGAGRGSDAWGPPLLLEKDDRIVRTPPGPPLRLARNGSHQVTLRGFSKPSDLVGVFSCVGGAGARRTRVIYVHNSPGGELGRRGDGAGKTRPLTHLPPRSPPASRQGHTHCEQR

SEQ ID NO: 358 - protein, 414 aa, Homo sapiens
  REGION 1..414: note = TIE SR006B12
MVWRVPPFLLPILFLASHVGAAVDLTLLANLRLTDPQRFFLTCVSGEAGAGRGSDAWGPPLLLEKDDRIVRTPPGPPLRLARNGSHQVTLRGFSKPSDLVGVFSCVGGAGARRTRVIYVHNSPGAHLLPDKVTHTVNKGDTAVLSARVHKEKQTDVIWKSNGSYFYTLDWHEAQDGRFLLQLPNVQPPSSGIYSATYLEASPLGSAFFRLIVRGCGAGRWGPGCTKECPGCLHGGVCHDHDGECVCPPGFTGTRCEQACREGRFGQSCQEQCPGISGCRGLTFCLPDPYGCSCGSGWRGSQCQEACAPGHFGADCRLQCQCQNGGTCDRFSGCVCPSGWHGVHCEKSDRIPQILNMASELEFNLETMPRINCAAAGNPFPVRGSIELRKPDGTVLLVSPQSPQPTSPSGRLLHS

SEQ ID NO: 359 - protein, 317 aa, Homo sapiens
  REGION 1..317: note = TIE SR006B10
MVWRVPPFLLPILFLASHVGAAVDLTLLANLRLTDPQRFFLTCVSGEAGAGRGSDAWGPPLLLEKDDRIVRTPPGPPLRLARNGSHQVTLRGFSKPSDLVGVFSCVGGAGARRTRVIYVHNSPGAHLLPDKVTHTVNKGDTAVLSARVHKEKQTDVIWKSNGSYFYTLDWHEAQDGRFLLQLPNVQPPSSGIYSATYLEASPLGSAFFRLIVRGCGAGRWGPGCTKECPGCLHGGVCHDHDGECVCPPGFTGTRCEQACREGRFGQSCQEQCPGISGCRGLTFCLPDPYGCSCGSGWRGSQCQEVHQGHCGAREDHS

SEQ ID NO: 360 - protein, 751 aa, Homo sapiens
  REGION 1..751: note = TIE R016G03
MVWRVPPFLLPILFLASHVGAAVDLTLLANLRLTDPQRFFLTCVSGEAGAGRGSDAWGPPLLLEKDDRIVRTPPGPPLRLARNGSHQVTLRGFSKPSDLVGVFSCVGGAGARRTRVIYVHNSPGAHLLPDKVTHTVNKGDTAVLSARVHKEKQTDVIWKSNGSYFYTLDWHEAQDGRFLLQLPNVQPPSSGIYSATYLEASPLGSAFFRLIVRGCGAGRWGPGCTKECPGCLHGGVCHDHDGECVCPPGFTGTRCEQACREGRFGQSCQEQCPGISGCRGLTFCLPDPYGCSCGSGWRGSQCQEACAPGHFGADCRLQCQCQNGGTCDRFSGCVCPSGWHGVHCEKSDRIPQILNMASELEFNLETMPRINCAAAGNPFPVRGSIELRKPDGTVLLSTKAIVEPEKTTAEFEVPRLVLADSGFWECRVSTSGGQDSRRFKVNVKVPPVPLAAPRLLTKQSRQLVVSPLVSFSGDGPISTVRLHYRPQDSTMDWSTIVVDPSENVTLMNLRPKTGYSVRVQLSRPGEGGEGAWGPPTLMTTDCPEPLLQPWLEGWHVEGTDRLRVSWSLPLVPGPLVGDGFLLRLWDGTRGQERRENVSSPQARTALLTGLTPGTHYQLDVQLYHCTLLGPASPPAHVLLPPSGPPAPRHLHAQALSDSEIQLTWKHPEALPGPISKYVVEVQVAGGAGDPLWIDVDRPEETSTIIRGLNASTRYLFRMRASIQGLGDWSNTVEESTLGNGERAGPTGPPGL

SEQ ID NO: 361 - protein, 838 aa, synthetic construct
  REGION 1..838: note = TIE.IFP
MVWRVPPFLLPILFLASHVGAAVDLTLLANLRLTDPQRFFLTCVSGEAGAGRGSDAWGPPLLLEKDDRIVRTPPGPPLRLARNGSHQVTLRGFSKPSDLVGVFSCVGGAGARRTRVIYVHNSPGAHLLPDKVTHTVNKGDTAVLSARVHKEKQTDVIWKSNGSYFYTLDWHEAQDGRFLLQLPNVQPPSSGIYSATYLEASPLGSAFFRLIVRGCGAGRWGPGCTKECPGCLHGGVCHDHDGECVCPPGFTGTRCEQACREGRFGQSCQEQCPGISGCRGLTFCLPDPYGCSCGSGWRGSQCQEACAPGHFGADCRLQCQCQNGGTCDRFSGCVCPSGWHGVHCEKSDRIPQILNMASELEFNLETMPRINCAAAGNPFPVRGSIELRKPDGTVLLSTKAIVEPEKTTAEFEVPRLVLADSGFWECRVSTSGGQDSRRFKVNVKVPPVPLAAPRLLTKQSRQLVVSPLVSFSGDGPISTVRLHYRPQDSTMDWSTIVVDPSENVTLMNLRPKTGYSVRVQLSRPGEGGEGAWGPPTLMTTDCPEPLLQPWLEGWHVEGTDRLRVSWSLPLVPGPLVGDGFLLRLWDGTRGQERRENVSSPQARTALLTGLTPGTHYQLDVQLYHCTLLGPASPPAHVLLPPSGPPAPRHLHAQALSDSEIQLTWKHPEALPGPISKYVVEVQVAGGAGDPLWIDVDRPEETSTIIRGLNASTRYLFRMRASIQGLGDWSNTVEESTLGNGLQAEGPVQESRAAEEGLDQQLILAVVGSVSATCLTILAALLTLVCIRRSCLHRRRTFTYQSGSGEETILQFSSGTLTLTRRPKLQPEPLSYPVLEWED

SEQ ID NO: 362 - protein, 632 aa, synthetic construct
  REGION 1..632: note = TIE.IFP
MVWRVPPFLLPILFLASHVGAAVDLTLLANLRLTDPQRFFLTCVSGEAGAGRGSDAWGPPLLLEKDDRIVRTPPGPPLRLARNGSHQVTLRGFSKPSDLVGVFSCVGGAGARRTRVIYVHNSPGAHLLPDKVTHTVNKGDTAVLSARVHKEKQTDVIWKSNGSYFYTLDWHEAQDGRFLLQLPNVQPPSSGIYSATYLEASPLGSAFFRLIVRGCGAGRWGPGCTKECPGCLHGGVCHDHDGECVCPPGFTGTRCEQACREGRFGQSCQEQCPGISGCRGLTFCLPDPYGCSCGSGWRGSQCQEACAPGHFGADCRLQCQCQNGGTCDRFSGCVCPSGWHGVHCEKSDRIPQILNMASELEFNLETMPRINCAAAGNPFPVRGSIELRKPDGTVLLSTKAIVEPEKTTAEFEVPRLVLADSGFWECRVSTSGGQDSRRFKVNVKVPPVPLAAPRLLTKQSRQLVVSPLVSFSGDGPISTVRLHYRPQDSTMDWSTIVVDPSENVTLMNLRPKTGYSVRVQLSRPGEGGEGAWGPPTLMTTDCPEPLLQPWLEGWHVEGTDRLRVSWSLPLVPGPLVGDGFLLRLWDGTRGQERRENVSSPQARTALLTGLTPGTHYQLDVQLYHCTLLGPAS

SEQ ID NO: 363 - protein, 533 aa, synthetic construct
  REGION 1..533: note = TIE.IFP
MVWRVPPFLLPILFLASHVGAAVDLTLLANLRLTDPQRFFLTCVSGEAGAGRGSDAWGPPLLLEKDDRIVRTPPGPPLRLARNGSHQVTLRGFSKPSDLVGVFSCVGGAGARRTRVIYVHNSPGAHLLPDKVTHTVNKGDTAVLSARVHKEKQTDVIWKSNGSYFYTLDWHEAQDGRFLLQLPNVQPPSSGIYSATYLEASPLGSAFFRLIVRGCGAGRWGPGCTKECPGCLHGGVCHDHDGECVCPPGFTGTRCEQACREGRFGQSCQEQCPGISGCRGLTFCLPDPYGCSCGSGWRGSQCQEACAPGHFGADCRLQCQCQNGGTCDRFSGCVCPSGWHGVHCEKSDRIPQILNMASELEFNLETMPRINCAAAGNPFPVRGSIELRKPDGTVLLSTKAIVEPEKTTAEFEVPRLVLADSGFWECRVSTSGGQDSRRFKVNVKVPPVPLAAPRLLTKQSRQLVVSPLVSFSGDGPISTVRLHYRPQDSTMDWSTIVVDPSENVTLMNLRPKTGYSVRVQLSRPGEGGEGAWG

SEQ ID NO: 364 - protein, 428 aa, synthetic construct
  REGION 1..428: note = TIE.IFP
MVWRVPPFLLPILFLASHVGAAVDLTLLANLRLTDPQRFFLTCVSGEAGAGRGSDAWGPPLLLEKDDRIVRTPPGPPLRLARNGSHQVTLRGFSKPSDLVGVFSCVGGAGARRTRVIYVHNSPGAHLLPDKVTHTVNKGDTAVLSARVHKEKQTDVIWKSNGSYFYTLDWHEAQDGRFLLQLPNVQPPSSGIYSATYLEASPLGSAFFRLIVRGCGAGRWGPGCTKECPGCLHGGVCHDHDGECVCPPGFTGTRCEQACREGRFGQSCQEQCPGISGCRGLTFCLPDPYGCSCGSGWRGSQCQEACAPGHFGADCRLQCQCQNGGTCDRFSGCVCPSGWHGVHCEKSDRIPQILNMASELEFNLETMPRINCAAAGNPFPVRGSIELRKPDGTVLLSTKAIVEPEKTTAEFEVPRLVLADSGFWECRV

SEQ ID NO: 365 - protein, 344 aa, synthetic construct
  REGION 1..344: note = TIE.IFP
MVWRVPPFLLPILFLASHVGAAVDLTLLANLRLTDPQRFFLTCVSGEAGAGRGSDAWGPPLLLEKDDRIVRTPPGPPLRLARNGSHQVTLRGFSKPSDLVGVFSCVGGAGARRTRVIYVHNSPGAHLLPDKVTHTVNKGDTAVLSARVHKEKQTDVIWKSNGSYFYTLDWHEAQDGRFLLQLPNVQPPSSGIYSATYLEASPLGSAFFRLIVRGCGAGRWGPGCTKECPGCLHGGVCHDHDGECVCPPGFTGTRCEQACREGRFGQSCQEQCPGISGCRGLTFCLPDPYGCSCGSGWRGSQCQEACAPGHFGADCRLQCQCQNGGTCDRFSGCVCPSGWHGVHC

SEQ ID NO: 366 - protein, 255 aa, synthetic construct
  REGION 1..255: note = TIE.IFP
MVWRVPPFLLPILFLASHVGAAVDLTLLANLRLTDPQRFFLTCVSGEAGAGRGSDAWGPPLLLEKDDRIVRTPPGPPLRLARNGSHQVTLRGFSKPSDLVGVFSCVGGAGARRTRVIYVHNSPGAHLLPDKVTHTVNKGDTAVLSARVHKEKQTDVIWKSNGSYFYTLDWHEAQDGRFLLQLPNVQPPSSGIYSATYLEASPLGSAFFRLIVRGCGAGRWGPGCTKECPGCLHGGVCHDHDGECVCPPGFTGTRC

SEQ ID NO: 367 - protein, 197 aa, synthetic construct
  REGION 1..197: note = TIE.IFP
MVWRVPPFLLPILFLASHVGAAVDLTLLANLRLTDPQRFFLTCVSGEAGAGRGSDAWGPPLLLEKDDRIVRTPPGPPLRLARNGSHQVTLRGFSKPSDLVGVFSCVGGAGARRTRVIYVHNSPGAHLLPDKVTHTVNKGDTAVLSARVHKEKQTDVIWKSNGSYFYTLDWHEAQDGRFLLQLPNVQPPSSGIYSATY

SEQ ID NO: 368 - protein, 155 aa, Homo sapiens
  REGION 1..155: note = TNFR1B SR003H02
MAPVAVWAALAVGLELWAAAHALPAQVAFTPYAPEPGSTCRLREYYDQTAQMCCSKCSPGQHAKVFCTKTSDTVCDSCEDSTYTQLWNWVPECLSCGSRCSSDQVETQACTREQNRICTCRPGWYCALSKQEGCRLCAPLRKCRPGFGVARPDLS

SEQ ID NO: 369 - protein, 174 aa, Homo sapiens [sequence omitted]

SEQ ID NO: 370 - protein, 479 aa, Homo sapiens
  REGION 1..479: note = VEGFR1 FLT1.c 31
MVSYWDTGVLLCALLSCLLLTGSSSGSKLKDPELSLKGTQHIMQAGQTLHLQCRGEAAHKWSLPEMVSKESERLSITKSACGRNGKQFCSTLTLNTAQANHTGFYSCKYLAVPTSKKKETESAIYIFISDTGRPFVEMYSEIPEIIHMTEGRELVIPCRVTSPNITVTLKKFPLDTLIPDGKRIIWDSRKGFIISNATYKEIGLLTCEATVNGHLYKTNYLTHRQTNTIIDVQISTPRPVKLLRGHTLVLNCTATTPLNTRVQMTWSYPDEKNKRASVRRRIDQSNSHANIFYSVLTIDKMQNKDKGLYTCRVRSGPSFKSVNTSVHIYDKAFITVKHRKQQVLETVAGKRSYRLSMKVKAFPSPEVVWLKDGLPATEKSARYLTRGYSLIIKDVTEEDAGNYTILLSIKQSNVFKNLTATLIVNVKPQIYEKAVSSFPDPALYPLGSRQILTCTAYGIPQPTIKWFWHPCNHNHSEAR

SEQ ID NO: 371 - protein, 523 aa, Homo sapiens
  REGION 1..523: note = VEGFR1 FLT1.c 32
MVSYWDTGVLLCALLSCLLLTGSSSGSKLKDPELSLKGTQHIMQAGQTLHLQCRGEAAHKWSLPEMVSKESERLSITKSACGRNGKQFCSTLTLNTAQANHTGFYSCKYLAVPTSKKKETESAIYIFISDTGRPFVEMYSEIPEIIHMTEGRELVIPCRVTSPNITVTLKKFPLDTLIPDGKRIIWDSRKGFIISNATYKEIGLLTCEATVNGHLYKTNYLTHRQTNTIIDVQISTPRPVKLLRGHTLVLNCTATTPLNTRVQMTWSYPDEKNKRASVRRRIDQSNSHANIFYSVLTIDKMQNKDKGLYTCRVRSGPSFKSVNTSVHIYDKAFITVKHRKQQVLETVAGKRSYRLSMKVKAFPSPEVVWLKDGLPATEKSARYLTRGYSLIIKDVTEEDAGNYTILLSIKQSNVFKNLTATLIVNVKPQIYEILTCTAYGIPQPTIKWFWHPCNHNHSEARCDFCSNNEESFILDADSNMGNRIESITQRMAIIEGKNKLPPANSSFMLPPTSFSSNYFHFLP

SEQ ID NO: 372 - protein, 436 aa, Homo sapiens
  REGION 1..436: note = VEGFR1 FLT1.c 33
MVSYWDTGVLLCALLSCLLLTGSSSGSKLKDPELSLKGTQHIMQAGQTLHLQCRGEAAHKWSLPEMVSKESERLSITKSACGRNGKQFCSTLTLNTAQANHTGFYSCKYLAVPTSKKKETESAIYIFISDTGRPFVEMYSEIPEIIHMTEGRELVIPCRVTSPNITVTLKKFPLDTLIPDGKRIIWDSRKGFIISNATYKEIGLLTCEATVNGHLYKTNYLTHRQTNTIIDVQISTPRPVKLLRGHTLVLNCTATTPLNTRVQMTWSYPDEKNKRASVRRRIDQSNSHANIFYSVLTIDKMQNKDKGLYTCRVRSGPSFKSVNTSVHIYDKAFITVKHRKQQVLETVAGKRSYRLSMKVKAFPSPEVVWLKDGLPATEKSARYLTRGYSLIIKDKNLTATLIVNVKPQERIRERISPDLYRIWYPSTYNQVVLAPL

SEQ ID NO: 373 - protein, 365 aa, Homo sapiens
  REGION 1..365: note = VEGFR1 FLT1.c 34
MVSYWDTGVLLCALLSCLLLTGSSSGSKLKDPELSLKGTQHIMQAGQTLHLQCRGEAAHKWSLPEMVSKESERLSITKSACGRNGKQFCSTLTLNTAQANHTGFYSCKYLAVPTSKKKETESAIYIFISDTGRPFVEMYSEIPEIIHMTEGRELVIPCRVTSPNITVTLKKFPLDTLIPDGKRIIWDSRKGFIISNATYKEIGLLTCEATVNGHLYKTNYLTHRQTNTIIDVQISTPRPVKLLRGHTLVLNCTATTPLNTRVQMTWSYPDEKNKRASVRRRIDQSNSHANIFYSVLTIDKMQNKDKGLYTCRVRSGPSFKSVNTSVHIYGKHSSALPTHAMLSNHCRCLCSLNKSVFCWPRVTLS

SEQ ID NO: 374 - protein, 541 aa, Homo sapiens
  REGION 1..541: note = VEGFR1 SR018C02
MVSYWDTGVLLCALLSCLLLTGSSSGSKLKDPELSLKGTQHIMQAGQTLHLQCRGEAAHKWSLPEMVSKESERLSITKSACGRNGKQFCSTLTLNTAQANHTGFYSCKYLAVPTSKKKETESAIYIFISDTGRPFVEMYSEIPEIIHMTEGRELVIPCRVTSPNITVTLKKFPLDTLIPDGKRIIWDSRKGFIISNATYKEIGLLTCEATVNGHLYKTNYLTHRQTNTIIDVQISTPRPVKLLRGHTLVLNCTATTPLNTRVQMTWSYPDEKNKRASVRRRIDQSNSHANIFYSVLTIDKMQNKDKGLYTCRVRSGPSFKSVNTSVHIYDKAFITVKHRKQQVLETVAGKRSYRLSMKVKAFPSPEVVWLKDGLPATEKSARYLTRGYSLIIKDVTEEDAGNYTILLSIKQSNVFKNLTATLIVNVKPQIYEKAVSSFPDPALYPLGSRQILTCTAYGIPQPTIKWFWHPCNHNHSEARCDFCSNNEESFILDADSNMGNRIESITQRMAIIEGKNKLPPANSSFMLPPTSFSSNYFHFLP

SEQ ID NO: 375 - protein, 687 aa, synthetic construct
  REGION 1..687: note = VEGFR1 FLT1.d BUILD 31
MVSYWDTGVLLCALLSCLLLTGSSSGSKLKDPELSLKGTQHIMQAGQTLHLQCRGEAAHKWSLPEMVSKESERLSITKSACGRNGKQFCSTLTLNTAQANHTGFYSCKYLAVPTSKKKETESAIYIFISDTGRPFVEMYSEIPEIIHMTEGRELVIPCRVTSPNITVTLKKFPLDTLIPDGKRIIWDSRKGFIISNATYKEIGLLTCEATVNGHLYKTNYLTHRQTNTIIDVQISTPRPVKLLRGHTLVLNCTATTPLNTRVQMTWSYPDEKNKRASVRRRIDQSNSHANIFYSVLTIDKMQNKDKGLYTCRVRSGPSFKSVNTSVHIYDKAFITVKHRKQQVLETVAGKRSYRLSMKVKAFPSPEVVWLKDGLPATEKSARYLTRGYSLIIKDVTEEDAGNYTILLSIKQSNVFKNLTATLIVNVKPQIYEKAVSSFPDPALYPLGSRQILTCTAYGIPQPTIKWFWHPCNHNHSEARCDFCSNNEESFILDADSNMGNRIESITQRMAIIEGKNKMASTLVVADSRISGIYICIASNKVGTVGRNISFYITDVPNGFHVNLEKMPTEGEDLKLSCTVNKFLYRDVTWILLRTVNNRTMHYSISKQKMAITKEHSITLNLTIMNVSLQDSGTYACRARNVYTGEEILQKKEITIRGEHCNKKAVFSRISKFKSTRNDCTTQSNVKH

SEQ ID NO: 376 - protein, 712 aa, Homo sapiens
  REGION 1..712: note = VEGFR2 SR015F01
MQSKVLLAVALWLCVETRAASVGLPSVSLDLPRLSIQKDILTIKANTTLQITCRGQRDLDWLWPNNQSGSEQRVEVTECSDGLFCKTLTIPKVIGNDTGAYKCFYRETDLASVIYVYVQDYRSPFIASVSDQHGVVYITENKNKTVVIPCLGSISNLNVSLCARYPEKRFVPDGNRISWDSKKGFTIPSYMISYAGMVFCEAKINDESYQSIMYIVVVVGYRIYDVVLSPSHGIELSVGEKLVLNCTARTELNVGIDFNWEYPSSKHQHKKLVNRDLKTQSGSEMKKFLSTLTIDGVTRSDQGLYTCAASSGLMTKKNSTFVRVHEKPFVAFGSGMESLVEATVGERVRIPAKYLGYPPPEIKWYKNGIPLESNHTIKAGHVLTIMEVSERDTGNYTVILTNPISKEKQSHVVSLVVYVPPQIGEKSLISPVDSYQYGTTQTLTCTVYAIPPPHHIHWYWQLEEECANEPSQAVSVTNPYPCEEWRSVEDFQGGNKIEVNKNQFALIEGKNKTVSTLVIQAANVSALYKCEAVNKVGRGERVISFHVTRGPEITLQPDMQPTEQESVSLWCTADRSTFENLTWYKLGPQPLPIHVGELPTPVCKNLDTLWKLNATMFSNSTNDILIMELKNASLQDQGDYVCLAQDRKTKKRHCVVRQLTVLERVAPTITGNLENQTTSIGESIEVSCTASGNPPPQIMWFKDNETLVEDSE

SEQ ID NO: 377 - protein, 227 aa, Homo sapiens
  REGION 1..227: note = VEGFR3 SR007E10
MQRGAALCLRLWLCLGLLDGLVSGYSMTPPTLNITEESHVIDTGDSLSISCRGQHPLEWAWPGAQEAPATGDKDSEDTGVVRDCEGTDARPYCKVLLLHEVHANDTGSYVCYYKYIKARIEGTTAASSYVFVRGRTPCGCPVWCPSPASMSRCARKARCCGQTGRRWCGMTGGACSCPRHCCTMPCTCSARPPGETRTSFPTPSWCTSQATSSMTSSCCPGSRWSCW

SEQ ID NO: 378 - protein, 295 aa, Homo sapiens
  REGION 1..295: note = VEGFR3 SR007F05
MQRGAALCLRLWLCLGLLDGLVSGYSMTPPTLNITEESHVIDTGDSLSISCRGQHPLEWAWPGAQEAPATGDKDSEDTGVVRDCEGTDARPYCKVLLLHEVHANDTGSYVCYYKYIKARIEGTTAASSYVFVRDFEQPFINKPDTLLVNRKDAMWVPCLVSIPGLNVTLRSQSSVLWPDGQEVVWDDRRGMLVSTPLLHDALYLQCETTWGDQDFLSNPFLVHITGNELYDIQLLPRKSLELLVGEKLVLNCTVWAEFNSGVTFDWDYPGKQKIPSSASSGSKDPSWRPRQETSW

SEQ ID NO: 379 - protein, 765 aa, Homo sapiens
  REGION 1..765: note = VEGFR3 SR015G09
MQRGAALCLRLWLCLGLLDGLVSGYSMTPPTLNITEESHVIDTGDSLSISCRGQHPLEWAWPGAQEAPATGDKDSEDTGVVRDCEGTDARPYCKVLLLHEVHANDTGSYVCYYKYIKARIEGTTAASSYVFVRDFEQPFINKPDTLLVNRKDAMWVPCLVSIPGLNVTLRSQSSVLWPDGQEVVWDDRRGMLVSTPLLHDALYLQCETTWGDQDFLSNPFLVHITGNELYDIQLLPRKSLELLVGEKLVLNCTVWAEFNSGVTFDWDYPGKQAERGKWVPERRSQQTHTELSSILTIHNVSQHDLGSYVCKANNGIQRFRESTEVIVHENPFISVEWLKGPILEATAGDELVKLPVKLAAYPPPEFQWYKDGKALSGRHSPHALVLKEVTEASTGTYTLALWNSAAGLRRNISLELVVNVPPQIHEKEASSPSIYSRHSRQALTCTAYGVPLPLSIQWHWRPWTPCKMFAQRSLRRRQQQDLMPQCRDWRAVTTQDAVNPIESLDTWTEFVEGKNKTVSKLVIQNANVSAMYKCVVSNKVGQDERLIYFYVTTIPDGFTIESKPSEELLEGQPVLLSCQADSYKYEHLRWYRLNLSTLHDAHGNPLLLDCKNVHLFATPLAASLEEVAPGARHATLSLSIPRVAPEHEGHYVCEVQDRRSHDKHCHKKYLSVQALEAPRLTQNLTDLLVNVSDSLEMQCLVAGAHAPSIVWYKDERLLEEKSGREGGPGEGQVRRPARPTIPNPGGPAPPPHPLQESTWRTPTRS

SEQ ID NO: 380 - protein, 146 aa, Homo sapiens
  REGION 1..146: note = RAGE SR021A05
MAAGTAVGAWVLVLSLWGAVVGAQNITARIGEPLVLKCKGAPKKPPQRLEWKLNTGRTEAWKVLSPQGGGPWDSVARVLPNGSLFLPAVGIQDEGIFRCQAMNRNGKETKSNYRVRVYRKNSRVFSKASLLPKKKPSTPALAHEGL

SEQ ID NO: 381 - protein, 387 aa, Homo sapiens
  REGION 1..387: note = RAGE SR021C06
MAAGTAVGAWVLVLSLWGAVVGAQNITARIGEPLVLKCKGAPKKPPQRLEWKLNTGRTEAWKVLSPQGGGPWDSVARVLPNGSLFLPAVGIQDEGIFRCQAMNRNGKETKSNYRVRVYQIPGKPEIVDSASELTAGVPNKVGTCVSEGSYPAGTLSWHLDGKPLVPNEKGVSVKEQTRRHPETGLFTLQSELMVTPARGGDPRPTFSCSFSPGLPRHRALRTAPIQPRVWEPVPLEEVQLVVEPEGGAVAPGGTVTLTCEVPAQPSPQIHWMKDGVPLPLPPSPVLILPEIGPQDQGTYSCVATHSSHGPQESRAVSISIIGETSPQALQTLGLGCRTAQALISCPILALSLTATPPLPPCTHTQASPAPPKFCQESSQASPFFPLS

SEQ ID NO: 382 - protein, 266 aa, Homo sapiens
  REGION 1..266: note = RAGE SR021C02
MAAGTAVGAWVLVLSLWGAVVGAQNITARIGEPLVLKCKGAPKKPPQRLEWKLNTGRTEAWKVLSPQGGGPWDSVARVLPNGSLFLPAVGIQDEGIFRCQAMNRNGKETKSNYRVRVYQIPGKPEIVDSASELTAGVPNKVVEESRRSRKRPCEQEVGTCVSEGSYPAGTLSWHLDGKPLVPNEKGVSVKEQTRRHPETGLFTLQSELMVTPARGGDPRPTFSCSFSPGLPRHRALRTAPIQPRVWGEHRWGGPQAHVSTFWKSDP

SEQ ID NO: 383 - protein, 173 aa, Homo sapiens [sequence omitted]

SEQ ID NO: 384 - protein, 172 aa, Homo sapiens [sequence omitted]

SEQ ID NO: 385 - protein, 419 aa, Homo sapiens
  REGION 1..419: note = Herstatin
MELAALCRWGLLLALLPPGAASTQVCTGTDMKLRLPASPETHLDMLRHLYQGCQVVQGNLELTYLPTNASLSFLQDIQEVQGYVLIAHNQVRQVPLQRLRIVRGTQLFEDNYALAVLDNGDPLNNTTPVTGASPGGLRELQLRSLTEILKGGVLIQRNPQLCYQDTILWKDIFHKNNQLALTLIDTNRSRACHPCSPMCKGSRCWGESSEDCQSLTRTVCAGGCARCKGPLPTDCCHEQCAAGCTGPKHSDCLACLHFNHSGICELHCPALVTYNTDTFESMPNPEGRYTFGASCVTACPYNYLSTDVGSCTLVCPLHNQEVTAEDGTQRCEKCSKPCARGTHSLPPRPAAVPVPLRMQPGPAHPVLSFLRPSWDLVSAFYSLPLAPLDPTSVPISPVSVGRGPSPDAHVAVDLSRYEG

SEQ ID NO: 386 - protein, 419 aa, Homo sapiens
  VARIANT 342: note = Xaa= Thr or Ser
  REGION 1..419: note = Herstatin variant
MELAALCRWGLLLALLPPGAASTQVCTGTDMKLRLPASPETHLDMLRHLYQGCQVVQGNLELTYLPTNASLSFLQDIQEVQGYVLIAHNQVRQVPLQRLRIVRGTQLFEDNYALAVLDNGDPLNNTTPVTGASPGGLRELQLRSLTEILKGGVLIQRNPQLCYQDTILWKDIFHKNNQLALTLIDTNRSRACHPCSPMCKGSRCWGESSEDCQSLTRTVCAGGCARCKGPLPTDCCHEQCAAGCTGPKHSDCLACLHFNHSGICELHCPALVTYNTDTFESMPNPEGRYTFGASCVTACPYNYLSTDVGSCTLVCPLHNQEVTAEDGTQRCEKCSKPCARGXHSLPPRPAAVPVPLRMQPGPAHPVLSFLRPSWDLVSAFYSLPLAPLSPTSVPISPVSVGRGPDPDAHVAVDLSRYEG

SEQ ID NO: 387 - protein, 419 aa, Homo sapiens
  VARIANT 345: note = Xaa= Leu or Pro
  REGION 1..419: note = Herstatin variant
MELAALCRWGLLLALLPPGAASTQVCTGTDMKLRLPASPETHLDMLRHLYQGCQVVQGNLELTYLPTNASLSFLQDIQEVQGYVLIAHNQVRQVPLQRLRIVRGTQLFEDNYALAVLDNGDPLNNTTPVTGASPGGLRELQLRSLTEILKGGVLIQRNPQLCYQDTILWKDIFHKNNQLALTLIDTNRSRACHPCSPMCKGSRCWGESSEDCQSLTRTVCAGGCARCKGPLPTDCCHEQCAAGCTGPKHSDCLACLHFNHSGICELHCPALVTYNTDTFESMPNPEGRYTFGASCVTACPYNYLSTDVGSCTLVCPLHNQEVTAEDGTQRCEKCSKPCARGTHSXPPRPAAVPVPLRMQPGPAHPVLSFLRPSWDLVSAFYSLPLAPLSPTSVPISPVSVGRGPDPDAHVAVDLSRYEG

SEQ ID NO: 388 - protein, 419 aa, Homo sapiens
  VARIANT 346: note = Xaa= Pro or Leu
  REGION 1..419: note = Herstatin variant
MELAALCRWGLLLALLPPGAASTQVCTGTDMKLRLPASPETHLDMLRHLYQGCQVVQGNLELTYLPTNASLSFLQDIQEVQGYVLIAHNQVRQVPLQRLRIVRGTQLFEDNYALAVLDNGDPLNNTTPVTGASPGGLRELQLRSLTEILKGGVLIQRNPQLCYQDTILWKDIFHKNNQLALTLIDTNRSRACHPCSPMCKGSRCWGESSEDCQSLTRTVCAGGCARCKGPLPTDCCHEQCAAGCTGPKHSDCLACLHFNHSGICELHCPALVTYNTDTFESMPNPEGRYTFGASCVTACPYNYLSTDVGSCTLVCPLHNQEVTAEDGTQRCEKCSKPCARGTHSLXPRPAAVPVPLRMQPGPAHPVLSFLRPSWDLVSAFYSLPLAPLSPTSVPISPVSVGRGPDPDAHVAVDLSRYEG

SEQ ID NO: 389 - protein, 419 aa, Homo sapiens
  VARIANT 356: note = Xaa= Leu or Gln
  REGION 1..419: note = Herstatin variant
MELAALCRWGLLLALLPPGAASTQVCTGTDMKLRLPASPETHLDMLRHLYQGCQVVQGNLELTYLPTNASLSFLQDIQEVQGYVLIAHNQVRQVPLQRLRIVRGTQLFEDNYALAVLDNGDPLNNTTPVTGASPGGLRELQLRSLTEILKGGVLIQRNPQLCYQDTILWKDIFHKNNQLALTLIDTNRSRACHPCSPMCKGSRCWGESSEDCQSLTRTVCAGGCARCKGPLPTDCCHEQCAAGCTGPKHSDCLACLHFNHSGICELHCPALVTYNTDTFESMPNPEGRYTFGASCVTACPYNYLSTDVGSCTLVCPLHNQEVTAEDGTQRCEKCSKPCARGTHSLPPRPAAVPVPXRMQPGPAHPVLSFLRPSWDLVSAFYSLPLAPLSPTSVPISPVSVGRGPDPDAHVAVDLSRYEG

SEQ ID NO: 390 - protein, 419 aa, Homo sapiens
  VARIANT 358: note = Xaa= Met or Leu
  REGION 1..419: note = Herstatin variant
MELAALCRWGLLLALLPPGAASTQVCTGTDMKLRLPASPETHLDMLRHLYQGCQVVQGNLELTYLPTNASLSFLQDIQEVQGYVLIAHNQVRQVPLQRLRIVRGTQLFEDNYALAVLDNGDPLNNTTPVTGASPGGLRELQLRSLTEILKGGVLIQRNPQLCYQDTILWKDIFHKNNQLALTLIDTNRSRACHPCSPMCKGSRCWGESSEDCQSLTRTVCAGGCARCKGPLPTDCCHEQCAAGCTGPKHSDCLACLHFNHSGICELHCPALVTYNTDTFESMPNPEGRYTFGASCVTACPYNYLSTDVGSCTLVCPLHNQEVTAEDGTQRCEKCSKPCARGTHSLPPRPAAVPVPLRXQPGPAHPVLSFLRPSWDLVSAFYSLPLAPLSPTSVPISPVSVGRGPDPDAHVAVDLSRYEG

SEQ ID NO: 391 - protein, 419 aa, Homo sapiens; identical to SEQ ID NO: 390
  VARIANT 358: note = Xaa= Met or Ile
  REGION 1..419: note = Herstatin variant

SEQ ID NO: 392 - protein, 419 aa, Homo sapiens
  VARIANT 361: note = Xaa= Gly, Asp, Ala, or Val
  REGION 1..419: note = Herstatin variant
MELAALCRWGLLLALLPPGAASTQVCTGTDMKLRLPASPETHLDMLRHLYQGCQVVQGNLELTYLPTNASLSFLQDIQEVQGYVLIAHNQVRQVPLQRLRIVRGTQLFEDNYALAVLDNGDPLNNTTPVTGASPGGLRELQLRSLTEILKGGVLIQRNPQLCYQDTILWKDIFHKNNQLALTLIDTNRSRACHPCSPMCKGSRCWGESSEDCQSLTRTVCAGGCARCKGPLPTDCCHEQCAAGCTGPKHSDCLACLHFNHSGICELHCPALVTYNTDTFESMPNPEGRYTFGASCVTACPYNYLSTDVGSCTLVCPLHNQEVTAEDGTQRCEKCSKPCARGTHSLPPRPAAVPVPLRMQPXPAHPVLSFLRPSWDLVSAFYSLPLAPLSPTSVPISPVSVGRGPDPDAHVAVDLSRYEG

SEQ ID NO: 393 - protein, 419 aa, Homo sapiens
  VARIANT 376: note = Xaa= Leu or Ile
  REGION 1..419: note = Herstatin variant
MELAALCRWGLLLALLPPGAASTQVCTGTDMKLRLPASPETHLDMLRHLYQGCQVVQGNLELTYLPTNASLSFLQDIQEVQGYVLIAHNQVRQVPLQRLRIVRGTQLFEDNYALAVLDNGDPLNNTTPVTGASPGGLRELQLRSLTEILKGGVLIQRNPQLCYQDTILWKDIFHKNNQLALTLIDTNRSRACHPCSPMCKGSRCWGESSEDCQSLTRTVCAGGCARCKGPLPTDCCHEQCAAGCTGPKHSDCLACLHFNHSGICELHCPALVTYNTDTFESMPNPEGRYTFGASCVTACPYNYLSTDVGSCTLVCPLHNQEVTAEDGTQRCEKCSKPCARGTHSLPPRPAAVPVPLRMQPGPAHPVLSFLRPSWDXVSAFYSLPLAPLSPTSVPISPVSVGRGPDPDAHVAVDLSRYEG

SEQ ID NO: 394 - protein, 419 aa, Homo sapiens
  VARIANT 394: note = Xaa= Pro or Arg
  REGION 1..419: note = Herstatin variant
MELAALCRWGLLLALLPPGAASTQVCTGTDMKLRLPASPETHLDMLRHLYQGCQVVQGNLELTYLPTNASLSFLQDIQEVQGYVLIAHNQVRQVPLQRLRIVRGTQLFEDNYALAVLDNGDPLNNTTPVTGASPGGLRELQLRSLTEILKGGVLIQRNPQLCYQDTILWKDIFHKNNQLALTLIDTNRSRACHPCSPMCKGSRCWGESSEDCQSLTRTVCAGGCARCKGPLPTDCCHEQCAAGCTGPKHSDCLACLHFNHSGICELHCPALVTYNTDTFESMPNPEGRYTFGASCVTACPYNYLSTDVGSCTLVCPLHNQEVTAEDGTQRCEKCSKPCARGTHSLPPRPAAVPVPLRMQPGPAHPVLSFLRPSWDLVSAFYSLPLAPLSPTSVXISPVSVGRGPDPDAHVAVDLSRYEG

SEQ ID NO: 395 - protein, 419 aa, Homo sapiens
  VARIANT 404: note = Xaa= Pro or Leu
  REGION 1..419: note = Herstatin variant
MELAALCRWGLLLALLPPGAASTQVCTGTDMKLRLPASPETHLDMLRHLYQGCQVVQGNLELTYLPTNASLSFLQDIQEVQGYVLIAHNQVRQVPLQRLRIVRGTQLFEDNYALAVLDNGDPLNNTTPVTGASPGGLRELQLRSLTEILKGGVLIQRNPQLCYQDTILWKDIFHKNNQLALTLIDTNRSRACHPCSPMCKGSRCWGESSEDCQSLTRTVCAGGCARCKGPLPTDCCHEQCAAGCTGPKHSDCLACLHFNHSGICELHCPALVTYNTDTFESMPNPEGRYTFGASCVTACPYNYLSTDVGSCTLVCPLHNQEVTAEDGTQRCEKCSKPCARGTHSLPPRPAAVPVPLRMQPGPAHPVLSFLRPSWDLVSAFYSLPLAPLSPTSVPISPVSVGRGXDPDAHVAVDLSRYEG

SEQ ID NO: 396 - protein, 419 aa, Homo sapiens
  VARIANT 413: note = Xaa= Asp, Asn, or His
  REGION 1..419: note = Herstatin variant
MELAALCRWGLLLALLPPGAASTQVCTGTDMKLRLPASPETHLDMLRHLYQGCQVVQGNLELTYLPTNASLSFLQDIQEVQGYVLIAHNQVRQVPLQRLRIVRGTQLFEDNYALAVLDNGDPLNNTTPVTGASPGGLRELQLRSLTEILKGGVLIQRNPQLCYQDTILWKDIFHKNNQLALTLIDTNRSRACHPCSPMCKGSRCWGESSEDCQSLTRTVCAGGCARCKGPLPTDCCHEQCAAGCTGPKHSDCLACLHFNHSGICELHCPALVTYNTDTFESMPNPEGRYTFGASCVTACPYNYLSTDVGSCTLVCPLHNQEVTAEDGTQRCEKCSKPCARGTHSLPPRPAAVPVPLRMQPGPAHPVLSFLRPSWDLVSAFYSLPLAPLSPTSVPISPVSVGRGPDPDAHVAVXLSRYEG

SEQ ID NO: 397 - protein, 419 aa, Homo sapiens
  VARIANT 357: note = Xaa= Arg or Cys
  REGION 1..419: note = Herstatin variant
MELAALCRWGLLLALLPPGAASTQVCTGTDMKLRLPASPETHLDMLRHLYQGCQVVQGNLELTYLPTNASLSFLQDIQEVQGYVLIAHNQVRQVPLQRLRIVRGTQLFEDNYALAVLDNGDPLNNTTPVTGASPGGLRELQLRSLTEILKGGVLIQRNPQLCYQDTILWKDIFHKNNQLALTLIDTNRSRACHPCSPMCKGSRCWGESSEDCQSLTRTVCAGGCARCKGPLPTDCCHEQCAAGCTGPKHSDCLACLHFNHSGICELHCPALVTYNTDTFESMPNPEGRYTFGASCVTACPYNYLSTDVGSCTLVCPLHNQEVTAEDGTQRCEKCSKPCARGTHSLPPRPAAVPVPLXMQPGPAHPVLSFLRPSWDLVSAFYSLPLAPLSPTSVPISPVSVGRGPDPDAHVAVDLSRYEG

SEQ ID NO: 398 - protein, 419 aa, Homo sapiens
  VARIANT 371: note = Xaa= Arg or Ile
  REGION 1..419: note = Herstatin variant
MELAALCRWGLLLALLPPGAASTQVCTGTDMKLRLPASPETHLDMLRHLYQGCQVVQGNLELTYLPTNASLSFLQDIQEVQGYVLIAHNQVRQVPLQRLRIVRGTQLFEDNYALAVLDNGDPLNNTTPVTGASPGGLRELQLRSLTEILKGGVLIQRNPQLCYQDTILWKDIFHKNNQLALTLIDTNRSRACHPCSPMCKGSRCWGESSEDCQSLTRTVCAGGCARCKGPLPTDCCHEQCAAGCTGPKHSDCLACLHFNHSGICELHCPALVTYNTDTFESMPNPEGRYTFGASCVTACPYNYLSTDVGSCTLVCPLHNQEVTAEDGTQRCEKCSKPCARGTHSLPPRPAAVPVPLRMQPGPAHPVLSFLXPSWDLVSAFYSLPLAPLSPTSVPISPVSVGRGPDPDAHVAVDLSRYEG

SEQ ID NO: 399 - protein, 419 aa, Homo sapiens
  VARIANT 346: note = Xaa= Pro or Leu
  VARIANT 413: note = Xaa= Asp, His, or Asn
  REGION 1..419: note = Herstatin variant
MELAALCRWGLLLALLPPGAASTQVCTGTDMKLRLPASPETHLDMLRHLYQGCQVVQGNLELTYLPTNASLSFLQDIQEVQGYVLIAHNQVRQVPLQRLRIVRGTQLFEDNYALAVLDNGDPLNNTTPVTGASPGGLRELQLRSLTEILKGGVLIQRNPQLCYQDTILWKDIFHKNNQLALTLIDTNRSRACHPCSPMCKGSRCWGESSEDCQSLTRTVCAGGCARCKGPLPTDCCHEQCAAGCTGPKHSDCLACLHFNHSGICELHCPALVTYNTDTFESMPNPEGRYTFGASCVTACPYNYLSTDVGSCTLVCPLHNQEVTAEDGTQRCEKCSKPCARGTHSLXPRPAAVPVPLRMQPGPAHPVLSFLRPSWDLVSAFYSLPLAPLSPTSVPISPVSVGRGPDPDAHVAVXLSRYEG

SEQ ID NO: 400 - DNA, 15413 bp, Homo sapiens
  misc_feature 1..15413: note = EGFR genomic DNA
  source 1..15413: mol_type = genomic DNA
gagctagccccggcggccgccgccgcccagaccggacgacaggccacctcgtcggcgtccgcccgagtccccgcctcgccgccaacgccacaaccaccgcgcacggccccctgactccgtccagtattgatcgggagagccggagcgagctcttcggggagcagcgatgcgaccctccgggacggccggggcagcgctcctggcgctgctggctgcgctctgcccggcgagtcgggctctggaggaaaagaaaggtaagggcgtgtctcgccggctcccgcgccgcccccggatcgcgccccggaccccgcagcccgcccaaccgcgcaccggcgcaccggctcggcgcccgcgcccccgcccgtcctttcctgtttccttgagatcagctgcgccgccgaccgggaccgcgggaggaacgggacgtttcgttcactaaagctcactaagttagtaagctttgcgcccagatgacctgggcaggaatgggtgagtctctgtgtggagagagtgaagaaactgctacccttaatacctggaccttgagggattgttttattttagtttttctgcatttctcagtatttcatgtgatatctgtctttttcttccagtttgccaaggcacgagtaacaagctcacgcagttgggcacttttgaagatcattttctcagcctccagaggatgttcaataactgtgaggtggtccttgggaatttggaaattacctatgtgcagaggaattatgatctttccttcttaaaggttggtgactttgattttcctacacaaataaaattggagaaaatctaagtggagaaaggcctgggcagaattccacttgaagtgtgtttatttttgctatggcaatgacaagtcttacagagctacaaacgagagttttatgagaaagccattttaccagctaatgtcaagtaataactaatcgtggacatgctgcctcctgtgtccatgactgcaatcgtctacctattttacagttgttgagcactcgtgtgcattagggttcaactgggcgtcctagggctccctggacccattttagaccttgagttcttgagttcctcaaaagagaaatcacgcatttatgttttctcttcttagaccatccaggaggtggctggttatgtcctcattgccctcaacacagtggagcgaattcctttggaaaacctgcagatcatcagaggaaatatgtactacgaaaattcctatgccttagcagtcttatctaactatgatgcaaataaaaccggactgaaggagctgcccatgagaaatttacagggtgagaggctgggatgccaaggctgggggttcataaatgcagacagcagttccgatggctcccagcgagcttgtcactcaattccacctcggagaaggcttttatttttacccagtacacgtgcactgagtgccggctgtgtgtaagatactgcaggggaagttactgagaagatggcaggcaccatcattaacaattttatctggccgccccccgggaagttcactgggctaattgcgggactcttgttcgcaccatggcatctctttagcagaacataaatgcgaagagcacatgcatccttcatgggaatttaaaggagctggaaagagtgctcaccgcagttccattctcccgcagaaatcctgcatggcgccgtgcggttcagcaacaaccctgccctgtgcaacgtggagagcatccagtggcgggacatagtcagcagtgactttctcagcaacatgtcgatggacttccagaaccacctgggcagctgtaagtgtcgcatacacactatctctgcctccagctcctatgggggacagctctacagcactggggcaggggagagaagccatgtttagtaagtcacattaatcagaaacaaaaagtagtaagcaaaatatctgaccactagaaaagcatgtatttaccacggacatagagatcgttttttcatcttcttttcttatcggggtctcaagtgattctacaaaccagccagccaaacaatcagagaataagttgaaaagattgtcttcatttattgaatgtgcttaactcaggcccgggaaagggcgtcatcagtttctcatcatttcactgagatatgcatctattacttttacatttcaggccaaaagtgtgatccaagctgtcccaatgggagctgctggggtgcaggagaggagaactgccagaaacgtaagtcagtgaacagcctcagacccatgtgtgaccgcccctctcttccttcacttgcttaggtgattggatttgttttccctctgaagactccaaagagttactttattacagggtcagatgtgaaccagtaggtgaaggacagtcttgcaaatctcaccgcatgcagttaatccagggtcaggagaaaaaagaggcaatcagaaaagggcatggtttgacttagtttgaatgtggtttcgttggaagcaaatgtgtcttcactttttcatgaaaaagtctgcaagtgctctgcgacgtccctgggaaatgatcctaccctcactcttcagctcacagggaacctttgctctttttcagtgaccaaaatcatctgtgcccagcagtgctccgggcgctgccgtggcaagtcccccagtgactgctgccacaaccagtgtgctgcaggctgcacaggcccccgggagagcgactgcctggtaagatgcccctccagcagcctccctggagcaggctggggctgcacccgccccacccacaccaggacagaagacttcctgtgggggagctgtcaattagcatttgtcataacagacaggatattgccctctgcctggtgacaaagtatctttagtatcctgcctccaccactcactgagaagggtctttctgactctgcagagggcgccagctgggttttcccacactagtggaacactaggctgcaaagacagtaacttgggctttctgacgggagtcaacaccgtgctgcgcttcctccgtgtgtggcgctgagtgtacttacctcacttgcccagcgtgtcctctctcctccataggtctgccgcaaattccgagacgaagccacgtgcaaggacacctgccccccactcatgctctacaaccccaccacgtaccagatggatgtgaaccccgagggcaaatacagctttggtgccacctgcgtgaagaagtgtccccgtgagtcctcctctgtgggccctctaactggtcaggcatccttgtcccgctctgtctcctgctgagccctggagtatcccatcttggagagtctttgggtggatgtgtttgccttgcttggaggaggcgaccctgtgcccgtccaggcacacaggcgaggggaggggctggcttgctacctaaactcttgaacgggattccttctctatttgcaacctttcattctttgtccttaaagtaaataaagccaaaggaggatggagcctttccatcacccctcaagaggacctggaccgcctgtgtgaggcccgagcacctggtgccaccgtcatcaccttcctttcatgctctcttccccaggtaattatgtggtgacagatcacggctcgtgcgtccgagcctgtggggccgacagctatgagatggaggaagacggcgtccgcaagtgtaagaagtgcgaagggccttgccgcaaaggtaggaagcccgccggtgtgcggacgaggcttgttctcggctgctgaggctgggctctcatgccacctccaaaggaacacatcttcctcttctcattaaaaaacaactatacatatcgtttctttaaaacagaagataaagctgtaaagctaggttaggcaatgggaaggcactgaaggtccccccttcccgcctgcactctccccagccccttcagtgtttgttgagtgaatgaaggatgatgtggcagtggcggttccggtgaccggaattccttcctgcttccctctgcctgtggatccctagctattcttaatccaacaaatgtgaacggaatacacgtctctcttatctctgcagtgtgtaacggaataggtattggtgaatttaaagactcactctccataaatgctacgaatattaaacacttcaaaaactgcacctccatcagtggcgatctccacatcctgccggtggcatttagggggtgagtcacaggttcagttgcttgtataaagaaaaacaaaatctgcctttttaactggtagagattggtgatcaataatcaccctgttgtttgtttcagtgactccttcacacatactcctcctctggatccacaggaactggatattctgaaaaccgtaaaggaaatcacaggtttgagaaatgctacgaatattaaacacttcaaaaactgcacctccatcagtggcgatctccacatcctgccggtggcatttagggggtgagtcacaggttcagttgcttgtataaagaaaaacaaaatctgcctttttaactggtagagattggtgatcaataatcaccctgttgtttgtttcagtgactccttcacacatactcctcctctggatccacaggaactggatattctgaaaaccgtaaaggaaatcacaggtttgagctgaattatcacatgaatataaatgggaaatcagtgttttagagagagaacttttcgacatatttcctgttcccttggaataaaaacatttcttctgaaattttaccgttaatggctgatgttttgatatttttcaaaagtgcagtttctcctgcaggcaaaaggggacacgtcggcctgcgtccgccctgcgcatgtacactcagagaagatgataatgaaaaagaaagcaaatccaattttcccacttactgttcatataatacagagtccctgagagtctagagtaatgtctcatacaaaaaagaaactcctacgtggtgtgtgtctgaagtctttcatctgccttacagggtttttgctgattcaggcttggcctgaaaacaggacggacctccatgccttgagaacctagaaatcatacgcggcaggaccaagcaacagtaagttgaccacagccaaagcctggtagattacatttgcctttttagttggaaattaggcttaacaggagagttgctaagatagggcacagagctcctgcatctctcgccggcattcccaaatgctatctcacatgagcaggcacagggagcaagactgcacgaccactggcacaggctgaggaactttaaaaacacctgcagttttcaaaaggtgcagtgtgtgcctcccacagcatgacctaccatcattggaaagcagtttgtagtcaatcaaaggtggtctggagaaacaaagttttcagggatacattgtttttataatttttcaccacatgatttttcttctctccaatgtagtggtcagttttctcttgcagtcgtcagcctgaacataacatccttgggattacgctccctcaaggagataagtgatggagatgtgataatttcaggaaacaaaaatttgtgctatgcaaatacaataaactggaaaaaactgtttgggacctccggtcagaaaaccaaaattataagcaacagaggtgaaaacagctgcagtaagtcaccgctttctgtttagtttatggagttggttctaatgggtcctttatttgtatttagaatattgaagggctattcccatttaaattacttttttcagttccttaagaagcaaattaaaatcttaagattcctaactgtgaaattaccatgtgaattccattaaaactttttcctccagtcacggtcggcctctgggaagcccagtctgtgtcctcctccttcaggggtagccagcatgtctgtgtcacccaaggtcatggagcacagggcccctcccgggaaggtgccgtctcctccggcccctcgggtccctgctctgtcactgactgctgtgacccactctgtctccgcagaggccacaggccaggtctgccatgccttgtgctcccccgagggctgctggggcccggagcccagggactgcgtctcttgccggaatgtcagccgaggcagggaatgcgtggacaagtgcaaccttctggaggggtaggaggttatttctttaatccccttgcgttgatcaaaaataaggctccaggttgttgttatagctttacaggcattctgtttgattttctcttccttttattctttgcccttggcttttggaggttttgggttttctgtggggagacgggaagttgtttgattgcgttatttttggcatcagagagaagatgacccaggattcagttaacaaaatcagctgattatattactatatagtcctggagtcccaactccttgaccattacctcaagttatttggaattttgaagaggtgatttgtgttcctgcaataatgtctcaggggtgggctgacgggtttcctcttcctcctctcagtgagccaagggagtttgtggagaactctgagtgcatacagtgccacccagagtgcctgcctcaggccatgaacatcacctgcacaggacgggtaagagccccttgctgctatccacgtccatttcatgggaagggccttcacagaagccgaacagtgatgatggcccagggcatcctgtgtgggcaggacggccatcagagccacttcccagaggagacggcaggcgctgacagcgctgtccgggcagggtgtcggtgacattagcacacataacagtgaccatatcaagcaggtgcaatcacagaataactggttttctcctttaagaatttttctatcatttggctttccccactcacacacactaaatattttaagtaaaaagttacttccattttgaaagagaaaagaaagagacatgcatgaacatttttctccaccttggtgcagggaccagacaactgtatccagtgtgcccactacattgacggcccccactgcgtcaagacctgcccggcaggagtcatgggagaaaacaacaccctggtctggaagtacgcagacgccggccatgtgtgccacctgtgccatccaaactgcacctacgggtgagtggaaagtgaaggagaacagaacatttcctctcttgcaaattcagagatcaaaaatgtctcccaagttttccggcaacaaattgccgaggtttgtatttgagtcagttacttaaggtgttttggtccccacagccatgccagtagcaacttgcttgtgagcaggcctcagtgcagacaaatgaataaatgcataataaataattaaccaccaatccaacatccagacacatagtgattttaattatttaagagtagtttagcatatattgctttatgatttaattaaaaatctccaaaatatatgccaaagaagtagaatgagaaaaatgtatatttctctttcacttcctacagatgcactgggccaggtcttgaaggctgtccaacgaatgggtaagtgttcacagctctgtgtcacatggacctcgtcaagaatgaccacactgctgtgggtgaagatgctttcctgcatttctgactgtcctctgtcctgatcaagtttctatggctctgggccagcctaccctcagccagggtttctgcagagactgcccagctggttccacgtggctcagttggaaacgttgccttagaagcctgttttttctccttttagaagctacatagtgtctcactttccaagatcattctacaagatgtcagtgcactgaaacatgcaggggcgtgttgagtgccaaggccatggaatctgtcagcaacctcacccttccttgttcctccacctcattccaggcctaagatcccgtccatcgccactgggatggtgggggccctcctcttgctgctggtggtggccctggggatcggcctcttcatgcgaaggcgccacatcgttcggaagcgcacgctgcggaggctgctgcaggagagggaggtgagtgccagtcctgggtgggctcaggagccctcgcaccccgacaggaacaagggccagccccgagaacgggccattagcagttgtgtatgttagatacataattgtattatgatgcagaaagaatctctgaatgtgcagttatacccagttggtgacatgttggtacatccatccgagctgtcaagctctgtagagaaggcgtacatttgtccttccaaatgagctggcaagtgccgtgtcctggcacccaagcccatgccgtggctgctggtccccctgctgggccatgtctggcactgctttccagcatggtgagggctgaggtgacccttgtctctgtgttcttgtcccccccagcttgtggagcctcttacacccagtggagaagctcccaaccaagctctcttgaggatcttgaaggaaactgaattcaaaaagatcaaagtgctgggctccggtgcgttcggcacggtgtataaggtaaggtccctggcacaggcctctgggctgggccgcagggcctctcatggtctggtggggagcccagagtccttgcaagctgtatatttccatcatctactttactctttgtttcactgagtgtttgggaaactccagtgtttttcccaagttattgagaggaaatcttttataaccacaagctgcagggctgcgggggcgtcacagcccccagcaatatcagccttaggtgcggctccacagccccagtgtccctcaccttcggggtgcatcgctggtaacatccacccagatcactgggcagcatgtggcaccatctcacaattgccagttaacgtcttccttctctctctgtcatagggactctggatcccagaaggtgagaaagttaaaattcccgtcgctatcaaggaattaagagaagcaacatctccgaaagccaacaaggaaatcctcgatgtgagtttctgctttgctgtgtgggggtccatggctctgaacctcaggcccaccttttctcatgtctggcagctgctctgctctagaccctgctcatctccacatcctaaatgttcactttctatgtctttccctttctagctctagtgggtataactccctccccttagagacagcactcttcacagccctgcgtaaacgtccctgtgctaggtcttttgcaggcacagcttttcctccatgagtacgtattttgaaactcaagatcgcattcatgcgtcttcacctggaaggggtccatgtgcccctccttctggccaccatgcgaagccacactgacgtgcctctccctccctccaggaagcctacgtgatggccagcgtggacaacccccacgtgtgccgcctgctgggcatctgcctcacctccaccgtgcagctcatcacgcagctcatgcccttcggctgcctcctggactatgtccgggaacacaaagacaatattggctcccagtacctgctcaactggtgtgtgcagatcgcaaaggtaatcagggaagggagatacggggaggggagataaggagccaggatcctcacatgcggtctgcgctcctgggatagcaagagtttgccatggggatatgtgtgtgcgtgcatgcagcacacacacattcctttattttggattcaatcaagttgatcttcttgtgcacaaatcagtgccgggttacatcttctttcatgcgcctttccattctttggatcagtagtcactaacgttcgccagccataagtcctcgacgtggagaggctcagagcctggcatgaacatgaccctgaattcggatgcagagcttcttcccatgatgatctgtccctcacagcagggtcttctctgtttcagggcatgaactacttggaggaccgtcgcttggtgcaccgcgacctggcagccaggaacgtactggtgaaaacaccgcagcatgtcaagatcacagattttgggctggccaaactgctgggtgcggaagagaaagaataccatgcagaaggaggcaaagtaaggaggtggctttaggtcagccagcattttcctgacaccagggaccaggctgccttcccactagctgtattgtttaacacatgcaggggaggatgctctccagacattctgggtgagctcgcagcagctgctgctggcagctgggtccagccagggtctcctggtagtgtgagccaggaactccgtcagactgaaatcccctgttgccgggaggaggcgccgggcctgggggacgggtcctggggtgatctggctcgtctgtgtgtgtcactcgtaattaggtccagagtgagttaactttttccaacagagggaaactaatagttgtctcactgcctcatctctcaccatcccaaggtgcctatcaagtggatggcattggaatcaattttacacagaatctatacccaccagagtgatgtctggagctacggtgagtcataatcctgatgctaatgagtttgtactgaggccaagctggcttttattgttagttaatttacattatatcctctgacatgcaagtattttctttcgagataatgactaatgataatgtaatcattgctgtctatctattgtactgagaaaacacggcagaggaaatcgagtcttaccccactttatagagaggtagactgaggcttccagcattgaagcaaattgcccaagactacagaaatgtaggtttctaaacatcaagaaacagtaaccagtaatgatgactaaagcaagggattgtgattgttcattcatgatcccactgccttcttttcttgcttcatcctctcaggggtgaccgtttgggagttgatgacctttggatccaagccatatgacggaatccctgccagcgagatctcctccatcctggagaaaggagaacgcctccctcagccacccatatgtaccatcgatgtctacatgatcatggtcaagtgtgagtgactggtgggtctgtccacactgcctagctgagccttggtggctgctcttagccaaacagctgaggcctttgcatccctggagaaatgtcatcacattacttaaggcaggcacacaaatccagaaacatctgtaaataccccttcaagcattcttttaaagacacttcttgactgtctttaaacagtaaccagtactagctggccaagacagaaaagtctaccacaaagacttggttctttcatcacttatttgactggaagtgtcgcatcaccaatgccttctttaagcaatgccatctttatcatttcttccagtgttctaattgcactgttttttctcattccttccccaggctggatgatagacgcagatagtcgcccaaagttccgtgagttgatcatcgaattctccaaaatggcccgagacccccagcgctaccttgtcattcaggtacaaattgcagtctgtgcttccattgggaagagtccctctaatgagcatctcatgtcactgtgttctgtcacatgccagcctggcctccctgtgtcccagatcgcattattaaaccctccagcgcattagagcaagcctcagtaaggcgcaggccacatcgtgaactaagcagcatccggcacccacatcatgtcatgaggggaggcagctataatttagagaaccaagggggatttcattataacaaaattggcaaacacacaggcacctgctggcaatagacccctgctcctatagccaagaagtggaatagcatctctacgggccattctaatagcctcaaaatctctgcaccagggggatgaaagaatgcatttgccaagtcctacagactccaacttctaccgtgccctgatggatgaagaagacatggacgacgtggtggatgccgacgagtacctcatcccacagcagggcttcttcagcagcccctccacgtcacggactcccctcctgagctctctggtatgaaatctctgtctctctctctctctcaagctgtgtctactcatttgaacaaattgaattttagggaaaataaccatctagtgaaactcacatggatatgaagtcaattttaaccaaatggtaaaatcaaaatcaaaataaattaagtgtattaattattttgttgcattgcaacaaggtccactatggaatgtaattaaatcaaaactaaacctagttgctctaaaactaacgattaagacaaaaattaaacaccttcacaatataccctccatgaggcacaccacctgcattcaggaaaagtggatgagatgtggtacaagcattccatgggcaacttctctgtttctttttcagagtgcaaccagcaacaattccaccgtggcttgcattgatagaaatggggtatgtatgaacaccttataagccagaatttacagctctccactatggctctattttacatggaaaatgccttaacctaaataattttaacccagataatcttgagttttcttcctgtgtgggtttttccctgcacggctgtcacgcctcacagtgccgttcaaagcgtgactcctggacctgctgcccaccctgcagcctgtggcccagtagcaccagcacccaccagggtgcagactctcaggcctgcccaacctactaatcagaaccagcatctcaaggagatctcgggtgatttttgcaaacactgaagttggggcagccctgaccggagtaaccttccctcatttcctcctgcagctgcaaagctgtcccatcaaggaagacagcttcttgcagcgatacagctcagaccccacaggcgccttgactgaggacagcatagacgacaccttcctcccagtgcctggtgagtggcttgtctggaaacagtcctgctcctcaacctcctcgacccactcagcagcagccagtctccagtgtccaagccaggtgctccctccagcatctccagagggggaaacagtggcagatttgcagacacagtgaagggcgtaaggagcagataaacacatgaccgagcctgcactgagaaggacaggaaagaacccactttcttttgcagcaacagcaagagggccctcccaaggctcctgctccctgtcataagtctccttgttgaggacattcacagggttcagaacccagggatcctgcatgggatggtgctttgctgattacttcacctctgatttctttccactttcagaatacataaaccagtccgttcccaaaaggcccgctggctctgtgcagaatcctgtctatcacaatcagcctctgaaccccgcgcccagcagagacccacactaccaggacccccacagcactgcagtgggcaaccccgagtatctcaacactgtccagcccacctgtgtcaacagcacattcgacagccctgcccactgggcccagaaaggcagccaccaaattagcctggacaaccctgactaccagcaggacttctttcccaaggaagccaagccaaatggcatctttaagggctccacagctgaaaatgcagaatacctaagggtcgcgccacaaagcagtgaatttattggagcatgaccacggaggatagtatgagccctaaaaatccagactctttcgatacccaggaccaagccacagcaggtcctccatcccaacagccatgcccgcattagctcttagacccacagactggttttgcaacgtttacaccgactagccaggaagtacttccacctcgggcacattttgggaagttgcattcctttgtcttcaaactgtgaagcatttacagaaacgcatccagcaagaatattgtccctttgagcagaaatttatctttcaaagaggtatatttgaaaaaaaaaaaaagtatatgtgaggatttttattgattggggatcttggagtttttcattgtcgctattgatttttacttcaatgggctcttccaacaaggaagaagcttgctggtagcacttgctaccctgagttcatccaggcccaactgtgagcaaggagcacaagccacaagtcttccagaggatgcttgattccagtggttctgcttcaaggcttccactgcaaaacactaaagatccaagaaggccttcatggccccagcaggccggatcggtactgtatcaagtcatggcaggtacagtaggataagccactctgtcccttcctgggcaaagaagaaacggaggggatggaattcttccttagacttacttttgtaaaaatgtccccacggtacttactccccactgatggaccagtggtttccagtcatgagcgttagactgacttgtttgtcttccattccattgttttgaaactcagtatgctgcccctgtcttgctgtcatgaaatcagcaagagaggatgacacatcaaataataactcggattccagcccacattggattcatcagcatttggaccaatagcccacagctgagaatgtggaatacctaaggatagcaccgcttttgttctcgcaaaaacgtatctcctaatttgaggctcagatgaaatgcatcaggtcctttggggcatagatcagaagactacaaaaatgaagctgctctgaaatctcctttagccatcaccccaaccccccaaaattagtttgtgttacttatggaagatagttttctccttttacttcacttcaaaagctttttactcaaagagtatatgttccctccaggtcagctgcccccaaaccccctccttacgctttgtcacacaaaaagtgtctctgccttgagtcatctattcaagcacttacagctctggccacaacagggcattttacaggtgcgaatgacagtagcattatgagtagtgtggaattcaggtagtaaatatgaaactagggtttgaaattgataatgctttcacaacatttgcagatgttttagaaggaaaaaagttccttcctaaaataatttctctacaattggaagattggaagattcagctagttaggagcccaccttttttcctaatctgtgtgtgccctgtaacctgactggttaacagcagtcctttgtaaacagtgttttaaactctcctagtcaatatccaccccatccaatttatcaaggaagaaatggttcagaaaatattttcagcctacagttatgttcagtcacacacacatacaaaatgttccttttgcttttaaagtaatttttgactcccagatcagtcagagcccctacagcattgttaagaaagtatttgatttttgtctcaatgaaaataaaactatattcatttccactctattatgctctcaaatacccctaagcatctatactagcctggtatgggtatgaaagatacaaagataaataaaacatagtccctgattctaagaaattcacaatttagcaaaggaaatggactcatagatgctaaccttaaaacaacgtgacaaatgccagacaggacccatcagc

SEQ ID NO: 401 - DNA, 14198 bp, Homo sapiens
  misc_feature 1..14198: note = ErbB2 genomic DNA
  source 1..14198: mol_type = genomic DNA
gcgagctgggagcgcgcttgctcccaatcacaggagaaggaggaggtggaggaggagggctgcttgaggaagtataagaatgaagttgtgaagctgagattcccctccattgggaccggagaaaccaggggagccccccgggcagccgcgcgccccttcccacggggccctttactgcgccgcgcgcccggcccccacccctcgcagcaccccgcgccccgcgccctcccagccgggtccagccggagccatggggccggagccgcagtgagcaccatggagctggcggccttgtgccgctgggggctcctcctcgccctcttgccccccggagccgcgagcacccaaggtgggtctggtgtggggaggggacggagcagcggcgggaccctgccctgtggatgccccgccgaggtcccgcggccggcggggccagaggggcccggacgagctctcctatcccgaagttgtggacagtcgagacgctcagggcagccgggccctggggccctcgggcgggagggggcaggcacgcaagctttctcctgctgttaaacctgcagtgtgcaagggacatgggcggaggggtccttcagtcaggcttctccctgtctgaggtggcatgacttggagtgagtttggatggggtggccaggtctgagaaggtcccccgccagtgtcctctgacccatctgctctctcctgccagtgtgcaccggcacagacatgaagctgcggctccctgccagtcccgagacccacctggacatgctccgccacctctaccagggctgccaggtggtgcagggaaacctggaactcacctacctgcccaccaatgccagcctgtccttcctgcaggtgaggcccgtgggcaacccagccaggccctgcctccagctgggctgagccctctgtttacaggtgggtggcagaagaaggtgccctgcccttctgtttcctctcttgttgtggtttctcaaccaggaagtcctttctaacatctaacccccattcattttactgcagaatcagttgacttctggtgaggcaaggtagggcgtgatctttatctctattttatcgttttatttaagcgggaacaggactgctcagtggctgggggccttgcccaagatctccaagtactggggaaccccagggaggccctggggggtggcagtgttcctatttcagccccactctgcttccccctcccaggatatccaggaggtgcagggctacgtgctcatcgctcacaaccaagtgaggcaggtcccactgcagaggctgcggattgtgcgaggcacccagctctttgaggacaactatgccctggccgtgctagacaatggagacccgctgaacaataccacccctgtcacaggggcctccccaggaggcctgcgggagctgcagcttcgaagcctcacaggtggccttcaccgtcattgaaaccttctcttggttattcagagctgaccagggccactgctaaccagggggaggctttgtgtgcattagaaatggtgtcccttctgggcagacgcaggcagagcccgggaagacgccctcagaagattggaaaaagattccccttcttcctgggaagttgtcttgttgcgggtgtggtggtggtgggactcaaagacggtaaagatagctttctctcctccctggggaatctgggggttgtttaaaaggcctgctcctcttttagaaggcaggagggccccaagggaagcagaaggtgacagaaggggaaagggtcctctgatcattgctcaccccacagagatcttgaaaggaggggtcttgatccagcggaacccccagctctgctaccaggacacgattttgtggaaggacatcttccacaagaacaaccagctggctctcacactgatagacaccaaccgctctcgggcctgtaagccatgcccctccctgctgcctcttctctcagacagcctgaccccagccgcaaactcccaacttacaacccagtgcctgcccgccactgccccagccgcctacaccacccatttcctccctctctgtccctcctgccatctccctgtgcctcttcatctctggggttctctgtcttgtctccctctgcttataggttgtgcctctggtttgggggcctctcagcctgtctgggtccctcccttgctgtgcagttggcctcgtggcctctgctgctgtttgtgcctctctctgttactaacccgtcctctcgctgttagacatctctctcactgcctgtctctggttctgtcctcaggccacccctgttctccgatgtgtaagggctcccgctgctggggagagagttctgaggattgtcagagccgtgagtctcagggaggcctggagtcagggaaggggagggctggggccgggtggaatgcaggtgtcatacaggtgacatgggaggggtgggataacaggcttgggatgtctcccctgggccaggtagtctccctagaaggtgatgctgatgagggtctggtgcccagggcgccactcagcccagggaaggggagggctggggccgggtggaatgcaggtgtcatacaggtgacatgggaggggtgggataacaggcttgggatgtctcccctgggccaggtagtctccctagaaggtgatgctgatgagggtctggtgcccagggcgccactcagccctcatcctgccctttgcccaacagtgacgcgcactgtctgtgccggtggctgtgcccgctgcaaggggccactgcccactgactgctgccatgagcagtgtgctgccggctgcacgggccccaagcactctgactgcctggtatgtgcctctgctttgtgcccaatgtgctctaccccccaggatgcaaggggtgggcaccctgcctggtactgccctattgcccctggcacaccagggcaaaacagcacagtgaaagccagccacctgtccccccaggcctgcctccacttcaaccacagtggcatctgtgagctgcactgtgctgccggctgcacgggccccaagcactctgactgcctggtatgtgcctctgctttgtgcccaatgtgctctaccccccaggatgcaaggggtgggcaccctgcctggtactgccctattgcccctggcacaccagggcaaaacagcacagtgaaagccagccacctgtccccccaggcctgcctccacttcaaccacagtggcatctgtgagctgcactgcccagccctggtcacctacaacacagacacgtttgagtccatgcccaatcccgagggccggtatacattcggcgccagctgtgtgactgcctgtccctgtgagtgccagggagaaacacagttttctcattttggtggggaggtttgtttctgtaaatgggagcatatggggagcactgtctgcatcttgctttgagagctggtcatgacagttcctgccgagctgccttgttctttcaacagctgtggagcaggtggcagtaaggagaggcagctaatctcacagtgctgatcccgtctggttgttgtgaggggtaaatggatgtcaggtgctgatgcgtggtagggcatttaagtattggttgatattattcttcttgtgcctgggcacggtaatgctgctcatggtggtgcacgaagggccagggtatgtggctacatgttcctgatctccttagacaactacctttctacggacgtgggatcctgcaccctcgtctgccccctgcacaaccaagaggtgacagcagaggatggaacacagcggtgtgagaagtgcagcaagccctgtgcccgaggtacccactcactgcccccgaggccagctgcagttcctgtccctctgcgcatgcagcctggcccagcccaccctgtcctatccttcctcagaccctcttgggacctagtctctgccttctactctctacccctggcccccctcagccctacaagtgtccctatatcccctgtcagtgtggctcttgggacctagtctctgccttctactctctacccctggcccccctcagccctacaagtgtccctatatcccctgtcagtgtggggaggggcccggaccctgatgctcatgtggctgttgacctgtcccggtatgaaggctgagacggccccttccccacccacccccacctcctcagtgtgctatggtctgggcatggagcacttgcgagaggtgagggcagttaccagtgccaatatccaggagtttgctggctgcaagaagatctttgggagcctggcatttctgccggagagctttgatgggtaagagtgggcacgatgacctgagacagtgtcagggcagacagagtcctgaggatccagatgtggcagcatctcttggggatggcaggagacagaagtggggggatcaagaatgcaaagaaagcagatgggagaccagaggagcagggcctttggtgggtgggggtgattatttttgtatttgatagatgttgccgaactaaggcctgggctttgaagcccaggatgggaacagctgggctcgatgggcaaagggtttgagtgaaggcattcatggtggggagtggctggcatggccagtgctgggagtgatgtccaccctgttcctggccctgctgactcctctcctgacccctccagggacccagcctccaacactgccccgctccagccagagcagctccaagtgtttgagactctggaagagatcacaggtgggctctgtctctgcatcctgttctgcaggggctgggagtccttgtcctgtccccactcctttaatctcaccctctgcctgcaggttacctatacatctcagcatggccggacagcctgcctgacctcagcgtcttccagaacctgcaagtaatccggggacgaattctgcacaagtgtcctctcctgacccctccagggacccagcctccaacactgccccgctccagccagagcagctccaagtgtttgagactctggaagagatcacaggtgggctctgtctctgcatcctgttctgcaggggctgggagtccttgtcctgtccccactcctttaatctcaccctctgcctgcaggttacctatacatctcagcatggccggacagcctgcctgacctcagcgtcttccagaacctgcaagtaatccggggacgaattctgcacaagtgagcactgagaaagagggggcctgatggggaggagtcccagggaggagtccctgtgggaagctttgggcctgagggagtactcctgtagcagtaacctttccatgaaagtctgcagagtgtgctggggatggaggaagatgagaatagcctttgctgaccgggaaggggtccgtggtactgatggggaggagtcccagggaggagtccctgtgggaagctttgggcctgagggagtactcctgtagcagtaacctttccatgaaagtctgcagagtgtgctggggatggaggaagatgagaatagcctttgctgaccgggaaggggtccgtggtaaggtgcccacctttctcccatagtggcgcctactcgctgaccctgcaagggctgggcatcagctggctggggctgcgctcactgagggaactgggcagtggactggccctcatccaccataacacccacctctgcttcgtgcacacggtgccctgggaccagctctttcggaacccgcaccaagctctgctccacactgccaaccggccagaggacgagtgtggtaagacagggagcccagtgtgcgcactccccatctgccagcacacagcagtgcccagggggccctggcagcagcgttcttggacttgtgcagactgcccgtctctgtgcacccttcttgactcagcacagctctggctggcttggcctcttggcatggcttctctagctgggtcctaccgccttggcatccttccctccccctctgtttctgaaatctcagaactcttcctctccctacatcggccccacctgtccccacccctccagcccacagccatgcccacagccagttccctggttcacttggacctggggcctcccctaaaagtcccctgcggtcccttcctcctcactgcagtgggcgagggcctggcctgccaccagctgtgcgcccgagggcactgctggggtccagggcccacccagtgtgtcaactgcagccagttccttcggggccaggagtgcgtggaggaatgccgagtactgcaggggtatgaggggcggaggagagggtggctggaggggtgcatggggctcctctcagaccccctcaccactgtcccttctctcaggctccccagggagtatgtgaatgccaggcactgtttgccgtgccaccctgagtgtcagccccagaatggctcagtgacctgttttggaccggtgagctgccgagggcactgctggggtccagggcccacccagtgtgtcaactgcagccagttccttcggggccaggagtgcgtggaggaatgccgagtactgcaggggtatgaggggcggaggagagggtggctggaggggtgcatggggctcctctcagaccccctcaccactgtcccttctctcaggctccccagggagtatgtgaatgccaggcactgtttgccgtgccaccctgagtgtcagccccagaatggctcagtgacctgttttggaccggtgagctgctggcgggctcagagctgggtggaggggggcagcgagggggattgccagggacttggcaggatggcgagatgcagtagggtgtgctatctggtaaaatatccctggagagggctcagcgctcagacctgaacagcaacagagtggcagaaaaggggcctgggggacactgggggccccgagggaggggccacagagactgggtgaagagcaagggtgtttgtcccaggagcatggcgaaaattgctgctgggtggccttgggaagcacaaaggggacccaactaagggcctgatcctactgccctgggggtgtcagtgccagccccccacaaatcttttctgccccccccaggaggctgaccagtgtgtggcctgtgcccactataaggaccctcccttctgcgtggcccgctgccccagcggtgtgaaacctgacctctcctacatgcccatctggaagtttccagatgaggagggcgcatgccagccttgccccatcaactgcacccactcgtgagtccaacggtcttttctgcagaaaggaggactttcctttcaggggtctttctggggctcttactataaaaggggaccaactctccctttgtcatatcttgtttctgatgacaaaaataacacattgttaaaattgtaaaattaaaacatgaaatataaattaatgccctagcagttgagaaggagtctccttgtgaggtggtagaaggagcactgacggccttgagcccagtttctgcctttgtcaaatggggataatgacccagccacacccctcccagggttgttgtgaggctggaaaggtggttcccaagagggtggttcccagaattgttgatgagactgtttctcctgcagctgtgtggacctggatgacaagggctgccccgccgagcagagagccaggttggcctggaccccaggatgtacccttcattgcccttcactcccccactggatgctgggtggtcactgctgtagggaggggaccccctgacatatgtcccttcccacccactcttccactgtggaacctcctgtcattttccacttcaccaagtgacagaggacctgctcagatgctgattattgtggaggcagcggggagccaaggcaggttttagagtaggagagggtccaagcctgtgggtcacccttccgacttccctttccgaatgccaaacaccttcatgtcccccgtgggccccctttgtccctcccaccccaaactagccctcaatccctgaccctggcttccgcccccagccctctgacgtccatcatctctgcggtggttggcattctgctggtcgtggtcttgggggtggtctttgggatcctcatcaagcgacggcagcagaagatccggaagtacacgatgcggagactgctgcaggaaacggaggtgaggcggggtgaagtcctcccagcccgcgtggggtctgcaccggcccccggcactgacccaccaccccctcaccccagctggtggagccgctgacacctagcggagcgatgcccaaccaggcgcagatgcggatcctgaaagagacggagctgaggaaggtgaaggtgcttggatctggctggtcgtggtcttgggggtggtctttgggatcctcatcaagcgacggcagcagaagatccggaagtacacgatgcggagactgctgcaggaaacggaggtgaggcggggtgaagtcctcccagcccgcgtggggtctgcaccggcccccggcactgacccaccaccccctcaccccagctggtggagccgctgacacctagcggagcgatgcccaaccaggcgcagatgcggatcctgaaagagacggagctgaggaaggtgaaggtgcttggatctggcgcttttggcacagtctacaaggtcagggccaggtcctggggtgggcggccccagaggatgggggcggtgcctggaggggtgtggtcggcagttctgatgggaggggcaagagctggaggcagtgtttgggggagggcagttacagcggagaagggagcggggccaagccctagggtggtgaaggatgtttggaggacaagttctgatgggaggggcaagagctggaggcagtgtttgggggagggcagttacagcggagaagggagcggggccaagccctagggtggtgaaggatgtttggaggacaagtaatgatctcctggaaggcaggtaggatccagcccacgctcttctcactcatatcctcctctttctgcccagggcatctggatccctgatggggagaatgtgaaaattccagtggccatcaaagtgttgagggaaaacacatcccccaaagccaacaaagaaatcttagacgtaagcccctccaccctctcctgctaggaggacaggaaggaccccatggctgcaggtctgggctctggtctctcttcattggggtttggggagatatgactcccgcaaacctagactatttttttggagacggagtcttgctctgtcacccaggctggagtgcagtggcgttatctcggctcactgcccggcctaatctttgtatttttagtagagacagggtttcaccatgttgtccaggctggtactttgagccttcacaggctgtgggccatggctgtggtttgtgatggttgggaggctgtgtggtgtttgggggtgtgtggtctcccataccctctcagcgtacccttgtccccaggaagcatacgtgatggctggtgtgggctccccatatgtctcccgccttctgggcatctgcctgacatccacggtgcagctggtgacacagcttatgccctatggctgcctcttagaccatgtccgggaaaaccgcggacgcctgggctcccaggacctgctgaactggtgtatgcagattgccaaggtatgcacctgggctctttgcaggtctctccggagcaaacccctatgtccacaaggggctaggatggggactcttgctgggcatgtggccaggcccaggccctcccagaaggtctacatgggtgcttcccattccaggggatgagctacctggaggatgtgcggctcgtacacagggactgggctcccaggacctgctgaactggtgtatgcagattgccaaggtatgcacctgggctctttgcaggtctctccggagcaaacccctatgtccacaaggggctaggatggggactcttgctgggcatgtggccaggcccaggccctcccagaaggtctacatgggtgcttcccattccaggggatgagctacctggaggatgtgcggctcgtacacagggacttggccgctcggaacgtgctggtcaagagtcccaaccatgtcaaaattacagacttcgggctggctcggctgctggacattgacgagacagagtaccatgcagatgggggcaaggttaggtgaaggaccaaggagcagaggaggctgggtggagtggtgtctagcccatgggagaactctgagtggccacctccccacaacacacagttggaggacttcctcttctgccctcccaggtgcccatcaagtggatggcgctggagtccattctccgccggcggttcacccaccagacgggctggctcggctgctggacattgacgagacagagtaccatgcagatgggggcaaggttaggtgaaggaccaaggagcagaggaggctgggtggagtggtgtctagcccatgggagaactctgagtggccacctccccacaacacacagttggaggacttcctcttctgccctcccaggtgcccatcaagtggatggcgctggagtccattctccgccggcggttcacccaccagagtgatgtgtggagttatggtgtgtgatggggggtgttgggaggggtgggtgaggagccatggctggagggaggatgagagctgggatggggagaattacggggccacctcagcatgtgaagggagggaaggggctgcctgtgccccaccttgcagggtctgtgcacttcccaggattagggaaagaccgggtagggtcccccaccttgcagggtctgtgcacttcccaggattagggaaagaccgggtagggtctgtctcctggcatcacatctccccctgctacctgccatgatgctagactcctgagcagaacctctggctcagtacactaaagctccctctggccctcccactcctgaccctgtctctgccttaggtgtgactgtgtgggagctgatgacttttggggccaaaccttacgatgggatcccagcccgggagatccctgacctgctggaaaagggggagcggctgccccagccccccatctgcaccattgatgtctacatgatcatggtcaaatgtgcgtggctgagctgtgctggctgcctggaggagggtgggaggtcctgggtggaggagcccacaaggggcatgaaaggggaccaggatgtatgtagacccaggagccctagtatgttaggagcctcaaaaccttcttgtatcccttttacagtcaaagtccaaagccactcttgaggaatagaagagatgccaaaggttctggctgaagaccccagagtctggtgctacttctctaccacctgagggctttgggctgtcccttgggactgtctagaccagactggagggggagtgggaggggagaggcagcaagcacacagggcctgggactagcatgctgacctccctcctgccccaggttggatgattgactctgaatgtcggccaagattccgggagttggtgtctgaattctcccgcatggccagggacccccagcgctttgtggtcatccaggtactgggcctctgtgccccatccctgcctgtggctaagagcaccctcctgcagagggtgggaaggagagatgagtccagtatgccaggcccctcacggaaggctgcatgctgggctggggaggggccaccatcctgcctctccttcctccacagaatgaggacttgggcccagccagtccccccagcgctttgtggtcatccaggtactgggcctctgtgccccatccctgcctgtggctaagagcaccctcctgcagagggtgggaaggagagatgagtccagtatgccaggcccctcacggaaggctgcatgctgggctggggaggggccaccatcctgcctctccttcctccacagaatgaggacttgggcccagccagtcccttggacagcaccttctaccgctcactgctggaggacgatgacatgggggacctggtggatgctgaggagtatctggtaccccagcagggcttcttctgtccagaccctgccccgggcgctgggggcatggtccaccacaggcaccgcagctcatctaccagggtcagtgccctcggtcacactgtgtggctgtctgcttacctcccccaaccccggtggactagggtccctttctctgatgttccctcaactgtcacctctcaaggaaaccccattatccctacaaaaaattcttactgccttccaacccctgtgaccccattctctccacggtgactgtgtattatccctacaaaaaattcttactgccttccaacccctgtgaccccattctctccacggtgactgtgtcataccccaaaggtgacctctgtttttctcctgtgaccctgtcaccttccatggagtccccatcccagatccgtgagtgacccccatcatgactttctttcttgtccccagagtggcggtggggacctgacactagggctggagccctctgaagaggaggcccccaggtctccactggcaccctccgaaggggctggctccgatgtatttgatggtgacctgggaatgggggcagccaaggggctgcaaagcctccccacacatgaccccagccctctacagcggtacagtgaggaccccacagtacccctgccctctgagactgatggctacgttgcccccctgacctgcagcccccagcctggtatggagtccagtctaagcagagagactgatgggcaggggaggtgggaccttcagcccagggtccactgtgggggcagagggagtggcagagacaccggggttccttcccctaatgggtcaccttctcttgacctttcagaatatgtgaaccagccagatgttcggccccagcccccttatggctacgttgcccccctgacctgcagcccccagcctggtatggagtccagtctaagcagagagactgatgggcaggggaggtgggaccttcagcccagggtccactgtgggggcagagggagtggcagagacaccggggttccttcccctaatgggtcaccttctcttgacctttcagaatatgtgaaccagccagatgttcggccccagcccccttcgccccgagagggccctctgcctgctgcccgacctgctggtgccactctggaaaggcccaagactctctccccagggaagaatggggtcgtcaaagacgtttttgcctttgggggtgccgtggagaaccccgagtacttgacaccccagggaggagctgcccctcagccccaccctcctcctgccttcagcccagccttcgacaacctctattactgggaccaggacccaccagagcggggggctccacccagcaccttcaaagggacacctacggcagagaacccagagtacctgggtctggacgtgccagtgtgaaccagaaggccaagtccgcagaagccctgatgtgtcctcagggagcagggaaggcctgacttctgctggcatcaagaggtgggagggccctccgaccacttccaggggaacctgccatgccaggaacctgtcctaaggaaccttccttcctgcttgagttcccagatggctggaaggggtccagcctcgttggaagaggaacagcactggggagtctttgtggattctgaggccctgcccaatgagactctagggtccagtggatgccacagcccagcttggccctttccttccagatcctgggtactgaaagccttagggaagctggcctgagaggggaagcggccctaagggagtgtctaagaacaaaagcgacccattcagagactgtccctgaaacctagtactgccccccatgaggaaggaacagcaatggtgtcagtatccaggctttgtacagagtgcttttctgtttagtttttactttttttgttttgtttttttaaagatgaaataaagacccagggggagaatgggtgttgtatggggaggcaagtgtggggggtccttctccacacccactttgtccatttgcaaatatattttggaaaacagctaggcaccggcctatgtctgggggtggctctgtgccatcccttcctgctcaccttacactcaattcctcttttcctggagggagtggctgggaatcttcagaaagcttggatgaggagccagacatccagttctccagcttcagggttgggggagatcgggaagctggattcagatc

SEQ ID NO: 402 - DNA, 15055 bp, Homo sapiens
  misc_feature 1..15055: note = ErbB3 genomic DNA
  source 1..15055: mol_type = genomic DNA
agaaaaattagggtgagccccatcctcgatctgctccgccaagttgcgggaccgcggggcgtggcacgctcggggcaggcggtccgaggctccgcaatccctactccagcctcgcgcgggagggggcgcggccgtgactcacccccttccctctgcgttcctccctccctctctctctctctctcacacacacacacccctcccctgccatccctccccggactccggctccggctccgattgcaatttgcaacctccgctgccgtcgccgcagcagccaccaattcgccagcggttcaggtggctcttgcctcgatgtcctagcctaggggcccccgggccggacttggctgggctcccttcaccctctgcggagtcatgagggcgaacgacgctctgcaggtgctgggcttgcttttcagcctggcccggggctccgaggtgggcaactctcaggcaggtaagtggcgcgagagcaccggcgggctcggcacctgggagccggaacccagtgcgcgcagcctcggagggtatgggcacggtctcaggcggcgcggggttgtgggtgctgcccccggtttgccaggaccacctgggagaggggcggtcaggctcgggttatcggcgtggtccggccgaggaaagctctcaggccactacagcttctgcctatcgcttgtgggagggttggaggcaaatgccatctgatcctgtctaatgtaactggaagagggcaaccaagggggtgatctttggggatggcagatgggctgagaatttgtgtccagccctcagccactcttccctctgctttgaacagtgtgtcctgggactctgaatggcctgagtgtgaccggcgatgctgagaaccaataccagacactgtacaagctctacgagaggtgtgaggtggtgatggggaaccttgagattgtgctcacgggacacaatgccgacctctccttcctgcaggttagtgagcccaccctccttcctcaacctgctcctctttattctcccctagaaccctccttccttcttcagggctaccttctgctggagttcacccttcctaagactcaggagttcctaagattcaaaaccgtgtatttatggggacagtggctgtcatctgggacctatggtctcacttccagcctgggcaacaagagcgtaactccgtctcaaattttaaaaaaaagaaaaaaagaaaggaaagaaagaaggaagaattaaaacagttaaagagtctttaatgcctgaaggaggagaggagattgagattattttgccctgttgtctctctcatttacataatctgctctgtcacagtggattcgagaagtgacaggctatgtcctcgtggccatgaatgaattctctactctaccattgcccaacctccgcgtggtgcgagggacccaggtctacgatgggaagtttgccatcttcgtcatgttgaactataacaccaactccagccacgctctgcgccagctccgcttgactcagctcaccggtcagttcccgatggttccttctggcctcacccctcagccagcccaagactggtacctccttgatgatgacccaagactgctcactctaagtgcctcttccaaggtgcctgtcaccttggccgctgtctaaaggtccattgctccctaagcaatagagggcccccagtagggggagctagtttggcctgactcctcatcttataaagggagtcttctctgcagcttagatttaattggacctatctgtctgcctcattctcccactcctgagtctcaggtgtccttttggatgggtggagaggtaaggaagaggcgttccgctgcggcccttaaccctgtcacttctttccctacctcagagattctgtcagggggtgtttatattgagaagaacgataagctttgtcacatggacacaattgactggagggacatcgtgagggaccgagatgctgagatagtggtgaaggacaatggcagaagctgtaagtggccgtgatcaagattgctccccagtcccaccaaaccagagtgactcccttctttccatcatccttacattcctgatctgaacccgcctccccagtgaacaaacacctcaggtccctgactcagcagcccaccagggcagaccattccagtctcctggaatctaaaccacagagcgccccttgttgacaggtccacttgagcccagccctgctctccaagggcagggagggacacagccctggctttttgcttcccgggattgaggtgcctgtgtactgacatcataccccgttgattaaaacaagcctttcttagccctgatggccccttgtgttgccttccttcccaaccaggtcccccctgtcatgaggtttgcaaggggcgatgctggggtcctggatcagaagactgccagacatgtgggtttgaaattccctccaaaaacttcactcatacgctttcatatcccttcctccccaagcctgggtcaacactgtgggggaggcatgagcagtggcctcagaattcagtcctaggagccctaacagccatgctttctctccttccatagtgaccaagaccatctgtgctcctcagtgggtcctggatcagaagactgccagacatgtgggtttgaaattccctccaaaaacttcactcatacgctttcatatcccttcctccccaagcctgggtcaacactgtgggggaggcatgagcagtggcctcagaattcagtcctaggagccctaacagccatgctttctctccttccatagtgaccaagaccatctgtgctcctcagtgtaatggtcactgctttgggcccaaccccaaccagtgctgccatgatgagtgtgccgggggctgctcaggccctcaggacacagactgctttgtatgtaccctttccattgcctgggttctgaaattgggatgtggcctttgaggaggaggtaggggtacacacgtaacataaatctgatgagcctccttttttcccaggcctgccggcacttcaatgacagtggagcctgtgtacctcgctgtccacagcctcttgtctacaacaagctaagcccaaccccaaccagtgctgccatgatgagtgtgccgggggctgctcaggccctcaggacacagactgctttgtatgtaccctttccattgcctgggttctgaaattgggatgtggcctttgaggaggaggtaggggtacacacgtaacataaatctgatgagcctccttttttcccaggcctgccggcacttcaatgacagtggagcctgtgtacctcgctgtccacagcctcttgtctacaacaagctaactttccagctggaacccaatccccacaccaagtatcagtatggaggagtttgtgtagccagctgtccccgtaagtgtctgaggggaaggaacaatgatcaacaatagtagatccaagattttagacaaaattgtggaagggaaaaagaatccagttggtgataaatagggagattggtgaatggttatgatcatctaaccactccagtgagtgacccttacgtccagtcctcccatgacttcagctatctagcaacaaatagtgaagagacttttgaatctatagggcagcacttaagggatctagggtggcagatggggacaaatccagtgcagagctggagggagcctaggcccagagcaagggttccattggtagctggtgatgttcctccctcatctctaatggtgtcctcctcctcttccctagataactttgtggtggatcaaacatcctgtgtcagggcctgtcctcctgacaagatggaagtagataaaaatgggctcaagatgtgtgagccttgtgggggactatgtcccaaaggtgggtaggagatggtaagaagttgtaaagagacagcctttcctctgagcctgcgcagaccacccccactgaacctctcttacatttgcagcctgtgagggaacaggctctgggagccgcttccagactgtggactcgagcaacattgatggatttgtgaactgcaccaagatcctgggcctgtgtcagggcctgtcctcctgacaagatggaagtagataaaaatgggctcaagatgtgtgagccttgtgggggactatgtcccaaaggtgggtaggagatggtaagaagttgtaaagagacagcctttcctctgagcctgcgcagaccacccccactgaacctctcttacatttgcagcctgtgagggaacaggctctgggagccgcttccagactgtggactcgagcaacattgatggatttgtgaactgcaccaagatcctgggcaacctggactttctgatcaccggcctcaatgggttagagatcctgccttccctccttagaccccagcccacgcacccctcacagttcatttcattggccaaaactttcctatgtggagctgactaggaatcaaagtcataaaattctagcctgttacaaaggacctgaaagaatgcttaacacatcctccatccaggccttcggtcccctcatcttgtttgcacaagatgctctgggcttatattatatttcccccatcccagccatttctccaaggaatgtttccttttagtggagaatgatatttagaaaccaaatgctgaggctgggtgtgctcattgccattgagttatacctttaccttattgactggtttctactgttctattcagagacccctggcacaagatccctgccctggacccagagaagctcaatgtcttccggacagtacgggagatcacaggtgagtggcagagagtttgccctttctagaagaataggtgaaccactggcataaattgcggtataactacttgagaaaatcacgtcccaagttataggggaggagccaggagaacccaagaaagaagaaggctccctgcccatatgcctctctccaacccctcaggttacctgaacatcctacgggagatcacaggtgagtggcagagagtttgccctttctagaagaataggtgaaccactggcataaattgcggtataactacttgagaaaatcacgtcccaagttataggggaggagccaggagaacccaagaaagaagaaggctccctgcccatatgcctctctccaacccctcaggttacctgaacatccagtcctggccgccccacatgcacaacttcagtgttttttccaatttgacaaccattggaggcagaagcctctacaagtgagtaaagggtatggaggaaatggcatcttcaggcaatgaagcctgtgtcataggcattctttagtaaaatacaaggcactgtctcatacagcagtgcctcaaaaccaaagggtttcagagtttcacgaggaaaaggcaaaaggagggggattccctctcagtggatctgactagcacatacagcagtgcctcaaaaccaaagggtttcagagtttcacgaggaaaaggcaaaaggagggggattccctctcagtggatctgactagcactgagcaaatttcttgactaacatgaatcctttgaatagttaatgttcccttagtagtctctcctctcatcctgtctccttattctcagccggggcttctcattgttgatcatgaagaacttgaatgtcacatctctgggcttccgatccctgaaggaaattagtgctgggcgtatctatataagtgccaataggcagctctgctaccaccactctttgaactggaccaaggtgcttcgggggcctacggaagagcgactagacatcaagcataatcggccgcgcagagactgcggtgagggaaagggtctgctaggtggtgagaatagggagtcagggaggagagggctgaaaggactattctgccctagacgtgggagtagggttgagggatggaaccaaggagaagggggctgttaggctggaagcagtaacgaggaagaataatgaagagagggcttgctgggagtcctcagggagtcagggaggagagggctgaaaggactattctgccctagacgtgggagtagggttgagggatggaaccaaggagaagggggctgttaggctggaagcagtaacgaggaagaataatgaagagagggcttgctgggagtcctcagactcctctcctaacccaccccttcctttccagtggcagagggcaaagtgtgtgacccactgtgctcctctgggggatgctggggcccaggccctggtcagtgcttgtcctgtcgaaattatagccgaggaggtgtctgtgtgacccactgcaactttctgaatgggtacagtaaggggagccagtcaaggatgggtgggggtggggccctgcaatggaactgttcaggtggcatacaataaaagtctttagacagctttctgcatgtgccttggtgggattgaggtaggagacctgtggttgtgagatcggagcatgaaggtcaggacttggaagtgacccccccaggatgggtgggggtggggccctgcaatggaactgttcaggtggcatacaataaaagtctttagacagctttctgcatgtgccttggtgggattgaggtaggagacctgtggttgtgagatcggagcatgaaggtcaggacttggaagtgacccccccctccctttattccccactacagggagcctcgagaatttgcccatgaggccgaatgcttctcctgccacccggaatgccaacccatggagggcactgccacatgcaatggctcggtatactagtagcaccaggatctccaagggagacagagaaggggcaatacttggagcatctggggaatgatatggctaaggatagcacagagaggccagataatgctagggcctgcagatagaagatcctgaatgtctgggttggtctttgctgggaggtatggaattgaccttgggatcacagagaaggggcaatacttggagcatctggggaatgatatggctaaggatagcacagagaggccagataatgctagggcctgcagatagaagatcctgaatgtctgggttggtctttgctgggaggtatggaattgaccttgggatctgattcttcctgaccttctctcttccactcagggctctgatacttgtgctcaatgtgcccattttcgagatgggccccactgtgtgagcagctgcccccatggagtcctaggtgccaagggcccaatctacaagtacccagatgttcagaatgaatgtcggccctgccatgagaactgcacccaggggtcagtgatgggataataaggagagggggtcaggtggaagggtaggagcacagaactagagtgagggaagcagaaagaagagagaggctgtgattcaagaatcactcccagctggccgggcgcagtggctcacacctgtaatcccagcactgtgggaggccgaggtgggtggatcacctgcagaagaggggcttggggagagctagtgagctggaggtggaggccatgtcttgggatcagctctgggctccaggatgggatgccacggtaagttctgaaacaagcttttatatgttaggctgttgaaattgagcctctgctgtccaagctctcatttaaggtggtgactttcttccctaggtgtaaaggaccagagcttcaagactgtttaggacaaacactggtgctgatcgggtatgatggggttggagattctggaaactggggatatttgggagttgggagagaggtggttacctggagagaagagggaggctgtcttcattctggccttttatgtatgcagtccactatcactggacacttgggactcaagaatgcaggcttctggacttcccttcctaaaattaactttaactttcagtagtctaagactggtccagatttaggttggtcccttcagtgcttaaggatatatatgtgaatgttaatttcttgccccaggtcagcatcataccttcaacacaagtatagttgacatttgtaaggaagatgcaaacccaggataatgttgggtttctatatatcccatagcaaaacccatctgacaatggctttgacagtgatagcaggattggtagtgattttcatgatgctgggcggcacttttctctactggcgtgggcgccggattcagaataaaagggctatgaggcgatacttggaacggggtgaggtgagtacttagcttacttttgttttttcttttctttttttgcatgtcctggaagtctctttatagcttaattttgagtggtaccctgtgcacccaggggtcagtgatgggataaatgtcactcccctcctctttccccagagatttgatccctttcttcaaggaagtagtgtggtccccaacttcctcagttctcagggtctgtacctcaatatgcctataatccattccaggactaacggtgcttcctcttcctgccctttcagctgtgctgcttttggcattcacctatgaggagcgggttggagtgggacatgggaatggcctttcctgagtaactccttcccatttgctcctcagagcatagagcctctggaccccagtgagaaggctaacaaagtcttggccagaatcttcaaagagacagagctaaggaagcttaaagtgcttggctcgggtgtctttggaactgtgcacaaagtgagtgacccataggaattctggagaggtggggaaggcatctagggcaaaggggtgaaagatttttgcataggattgacctagggagaatgaccttatgccaactcctgccccaaacttcccagggagtgtggatccctgagggtgaatcaatcaagattccagtctgcattaaagtcaagagctaaggaagcttaaagtgcttggctcgggtgtctttggaactgtgcacaaagtgagtgacccataggaattctggagaggtggggaaggcatctagggcaaaggggtgaaagatttttgcataggattgacctagggagaatgaccttatgccaactcctgccccaaacttcccagggagtgtggatccctgagggtgaatcaatcaagattccagtctgcattaaagtcattgaggacaagagtggacggcagagttttcaagctgtgacagatgtaagtgaaggaaattctgtatgccgctaggagagaggacaatattagatacaatcatgtagaagcagggtcctgtgcttctcagcagctactatgttagccagaatgttgggggtgggggggcctgggctggctgtgcacatgctgagtgtatgtgaacctgttggtttcctagataatgtatgccgctaggagagaggacaatattagatacaatcatgtagaagcagggtcctgtgcttctcagcagctactatgttagccagaatgttgggggtgggggggcctgggctggctgtgcacatgctgagtgtatgtgaacctgttggtttcctagataataccttttgtgtctcttagcatatgctggccattggcagcctggaccatgcccacattgtaaggctgctgggactatgcccagggtcatctctgcagcttgtcactcaatatttgcctctgggttctctgctggatcatgtgagacaacaccggggggcactggggccacagctgctgctcaactggggagtacaaattgccaaggtgagagaagcctggaggaattctgtgataagaactgcttgtctgggggccagccaggaaaaagtgagaaggttgaagttctgagaggtgaggtccccaacccccgggctgcagactggtaccagtccatggcctgttaggaaccaggccacagagcatgtgagcggcaggcaagcgagtttcatcccaaaaccaaccctccccttcccctggaaaaactgtcttccacaaaaccagtccctggtgccaaaaaaggttggggaccactgctgagaggtaccttcaagatttgggggaattccagatctcagtgactgattcccccaaccttaagaatactttcttcccctatacctacagggaatgtactaccttgaggaacatggtatggtgcatagaaacctggctgcccgaaacgtgctactcaagtcacccagtcaggttcaggtggcagattttggtgtggctgacctgctgcctcctgatgataagcagctgctatacagtgaggccaaggtgaggagacacaaagggtaaggaggcgggggtggagtgaagcatggggatagggagcagccagtggtctcttccagaggcaagcagatgcttcatggtaagttcaaggagagaaggctgcagatgccagatattttagttcagagggcaacaaataaaataatgatcaagaacttgggagagaatggcgtgaacccaggaggcggagcttgcagtgggccgagatcgcaccactgcactccagtctgggcgacagagcgagactccgtctcaaaaaaaaaaaaaaaagaatttgggacttggaaatcctaagaaaatttgtggaaataaacttgtgatacctctatctttaatccgcagactccaattaagtggatggcccttgagagtatccactttgggaaatacacacaccagagtgatgtctggagctatggtcagtgcatctggatgccctctctaccatcactggccccagtttcaaatttaccttttgagaccccctcttagaatctctaagcacttcagatttttgtgttagatcaggttctgccttcccttcacttcatgcccatgtctactattttgccagtgactagtccatgtcttcctgcaaagtgcatctggatgccctctctaccatcactggccccagtttcaaatttaccttttgagaccccctcttagaatctctaagcacttcagatttttgtgttagatcaggttctgccttcccttcacttcatgcccatgtctactattttgccagtgactagtccatgtcttcctgcaacaggtgtgacagtttgggagttgatgaccttcggggcagagccctatgcagggctacgattggctgaagtaccagacctgctagagaagggggagcggttggcacagccccagatctgcacaattgatgtctacatggtgatggtcaagtgtgagttacctgctgagcccaaccattttctctttttttctttttttttcttttttttttttttttgagacagagtctcacaattgtcacccaggctggagtgcaatggtgcaatcaatcttggctcactacaacctccgcctctcgggttcaagagattctcctgcttcagcctccggatttgtctttttagtagagatggggtttcactatgttggccaggctggtctcaaagtcccgacctcaggtgatccacccgccttggcctcccaaagtgctgggattataggtgtgagccaccgcgcccggccatggaatgtattctcttttatgtctctacctcctacatcttatctccaggttggatgattgatgagaacattcgcccaacctttaaagaactagccaatgagttcaccaggatggcccgagacccaccacggtatctggtcataaaggtgagtagggagtaggaggtgctaaggaaatttagaaaaaggaggagttggctggaaccaggattccccctaacaatcacctatcgatatagagagagagtgggcctggaatagcccctgggccagagccccatggtctgacaaacaagaagctagaggaagtagagctggagccagaactgatgagaacattcgcccaacctttaaagaactagccaatgagttcaccaggatggcccgagacccaccacggtatctggtcataaaggtgagtagggagtaggaggtgctaaggaaatttagaaaaaggaggagttggctggaaccaggattccccctaacaatcacctatcgatatagagagagagtgggcctggaatagcccctgggccagagccccatggtctgacaaacaagaagctagaggaagtagagctggagccagaactagacctagacctagacttggaagcagaggaggacaacctggcaaccaccacactgggctccgccctcagcctaccagttggaacacttaatcggccacgtggggtaagacaacttctaattacccaacactttgcaccctgagccctcacaaaccctacagatacccagattaactactcaaaggcccccatggtgaatgtagatttctcccttcatcttaaccttttccttattttttcatcctagagccagagccttttaagtccatcatctggatacatgagcctaccagttggaacacttaatcggccacgtggggtaagacaacttctaattacccaacactttgcaccctgagccctcacaaaccctacagatacccagattaactactcaaaggcccccatggtgaatgtagatttctcccttcatcttaaccttttccttattttttcatcctagagccagagccttttaagtccatcatctggatacatgcccatgaaccagggtaatcttggggagtcttgccaggtaagttctgttgctgagaggctgggttttaggatcagattgatacgagtagtatggaagacattagaaacctctgaggtttaatcagtgtcctgcaaaaaagaaggcagtgagggccgggcgagttggctcacacctgtaatcccagcactttgggaggccagagagagtggatcacctgtgagccaagataatgccactgcactccagcctgggcgacaagaacaagactccacctcaaaaaaaaaaaaaaaaaaaaaaaaaggcagtgaacaacccaatatccttctaaacaaatctctcttctttcctcatcatgtaaatttccttgcattattttctgtttattttcttccttaggagtctgcagtttctgggagcagtgaacggtgcccccgtccagtctctctacacccaatgccacggggatgcctggcatcagagtcatcagaggggcatgtaacaggctctgaggctgagctccaggagaaagtgtcaatgtgtaggagccggagcaggagccggagcccacggccacgcggagatagcgcctaccattcccagcgccacagtctgctgactcctgttaccccactctccccacccgggttagaggaagaggatgtcaacggttatgtcatgccagatacacacctcaaaggtgcctgactcttcctagggctttcctcaatttttcctcgaattctttccccgggctcctcttttttcttctctgatcatatgcctctctgtcctattaattttttcaaactttcccctaccctcatgaagttcttcacatacctagcctttcttctcaacccccaggtactccctcctcacacacctcaaaggtgcctgactcttcctagggctttcctcaatttttcctcgaattctttccccgggctcctcttttttcttctctgatcatatgcctctctgtcctattaattttttcaaactttcccctaccctcatgaagttcttcacatacctagcctttcttctcaacccccaggtactccctcctcccgggaaggcaccctttcttcagtgggtctcagttctgtcctgggtactgaagaagaagatgaagatgaggagtatgaatacatgaaccggaggagaaggcacagtccacctcatccccctaggccaagttcccttgaggagctgggttatgagtacatggatgtggggtcagacctcagtgcctctctgggcagcacacagagttgcccactccaccctgtacccatcatgcccactgcaggcacaactccagatgaagactatgaatatatgaatcggcaacgagatggaggtggtcctgggggtgattatgcagccatgggggcctgcccagcatctgagcaagggtatgaagagatgagagcttttcaggggcctggacatcaggccccccatgtccattatgcccgcctaaaaactctacgtagcttagaggctacagactctgcctttgataaccctgattactggcatagcaggcttttccccaaggctaatgcccagagaacgtaactcctgctccctgtggcactcagggagcatttaatggcagctagtgcctttagagggtaccgtcttctccctattccctctctctcccaggtcccagccccttttccccagtcccagacaattccattcaatctttggaggcttttaaacattttgacacaaaattcttatggtatgtagccagctgtgcactttcttctctttcccaaccccaggaaaggttttccttattttgtgtgctttcccagtcccattcctcagcttcttcacaggcactcctggagatatgaaggattactctccatatcccttcctctcaggctcttgactacttggaactaggctcttatgtgtgcctttgtttcccatcagactgtcaagaagaggaaagggaggaaacctagcagaggaaagtgtaattttggtttatgactcttaaccccctagaaagacagaagcttaaaatctgtgaagaaagaggttaggagtagatattgattactatcataattcagcacttaactatgagccaggcatcatactaaacttcacctacattatctcacttagtcctttatcatccttaaaacaattctgtgacatacatattatctcattttacacaaagggaagtcgggcatggtggctcatgcctgtaatctcagcactttgggaggctgaggcagaaggattacctgaggcaaggagtttgagaccagcttagccaacatagtaagacccccatctctttaaaaaaaaaaaaaaaaaaaaaaaaaaaactttagaactgggtgcagtggctcatgcctgtaatcccagccagcactttgggaggctgagatgggaagatcacttgagcccagaattagagataagcctatggaaacatagcaagacactgtctctacaggggaaaaaaaaaaaagaa

SEQ ID NO: 403 - DNA, 15565 bp, Homo sapiens
  misc_feature 1..15565: note = ErbB4 genomic DNA
  source 1..15565: mol_type = genomic DNA
gcgctcacactcgccccctcctcgggccccggccctggacccgcgggcgcggactcggtcgcccgccctgggagtcgccacaccgcgcgcgccgcgcccgcccccctcgcacccccacgcgcgcccggctgggggatctcctccgcgtgcccgaaagggggatatgccatttggacatgtaattgtcagcacgggatctgagacttccaaaaaatgaagccggcgacaggactttgggtctgggtgagccttctcgtggcggcggggaccgtccagcccagcgattctcagtcaggtgggttccttctggcactccggtcgccgaacctgcagccgccggcggggctgcctcgagtggctcccctgccctcttcacccatcccgggaggcgtggagggaccgcttgaccggggcctcttccctgggctttcggtcacccctctttccatttgaaacttaccctgtatgtgtgcgtgaatataaaagtgaaaatgttcatcagtgcgtgggtctatgcctcttaatgacgatcgaaatatttatattcagagaactgggataggcttgtggaatagagagttttgagaaagatattatcattgcgcatatcatataaaggttatgtaatttcacgtgtatcttcttgtctttgcagtgtgtgcaggaacggagaataaactgagctctctctctgacctggaacagcagtaccgagccttgcgcaagtactatgaaaactgtgaggttgtcatgggcaacctggagataaccagcattgagcacaaccgggacctctccttcctgcgggtaaagctgtggctttctttctcttctttgtgaatggacagtggcgtcatgatgcatacaggcagacctgtgtgctgatacctggaaggggtgctcttctgcctggcaggcactgtgactataggcaaaagataagagatagcgaaacgcacccaggaaaagaacaagagtaacaaagccgattctaaccctttgtgatcttttattatgaagccaattctttagaatatgatatggaaaataatgtattaaactaaaaactgaaaattagagtttaataactcattttaatctaaattgctacatatacagagtgacaaattcgttttataacacaggcaactgtttgtgtcttttcagtctgttcgagaagtcacaggctacgtgttagtggctcttaatcagtttcgttacctgcctctggagaatttacgcattattcgtgggacaaaactttatgaggatcgatatgccttggcaatatttttaaactacagaaaagatggaaactttggacttcaagaacttggattaaagaacttgacaggtaaggaatatatccaaaatggcaaatatgctttcattatcaatataaggcaattgtatatgtagggttactgtcatatttgttacattgaggaacactctaaggcatttaaatatcagtgatttatttgttttataagcaatgatgccctgtgatgcccttgcttttctttatagattttcaaattcctgtaatcaatgtatatgattcattgaaagatattttaaaagatatcttggctattagcaacatgactctaatttaacattgaaaatagttaagagcaaatcacttttgttgattaccttttcatcaacaagcagtttgacaaaaaatttgtttatttgttttttaatacagaaatcctaaatggtggagtctatgtagaccagaacaaattcctttgttatgcagacaccattcattggcaagatattgttcggaacccatggccttccaacttgactcttgtgtcaacaaatggtagttcaggatgtaagtagaattattctttttaatttctcaaaatgttctaccctatgtggcgatgaatgagttatgcttattatgtcattactaatattttgaactttgattgcattcattgaaatgttcagttatatatggcagaacaaatggctgatcaaccttttacttctagctaattctcttttgcatatgtttgacattcaggttttcctacttaagtgggcattttatgggctatgtttcagctctagtatgacataaaaatcctcataaaggagcaggagtatttcctttgaggagttactcctagtcaaggagtgaaagattataacgtgcatgtcctttttcccttttcgtgttctgcaggtggacgttgccataagtcctgtactggccgttgctggggacccacagaaaatcattgccagacttgtaagtgttcatcagtgagagcacacaggtttgatgtggtcaaggaattttaatgattggtccatttcatgcctctggtcatctaaaacatgaaatgagctatcacctccttgtggttgatttgctttgggccaagaaaactacccgattttcattgctttcaaatgaaaattaatatataattataaattaattttggagatttttgtataaaaattttgatctagttgtaaacctcattcattaaatgtttgctgaattgagtcaaagacagggtgagaaattgtcactccagaactcagcttatgagtttctcctggtggcagactttgatcatggtcctatctctgtcttctgcagtgacaaggacggtgtgtgcagaacaatgtgacggcagatgctacggaccttacgtcagtgactgctgccatcgagaatgtgctggaggctgctcaggacctaaggacacagactgctttgtatgtctgtgatttctctcttttattatcctgctctcctttccttccctatttgattcaggcatactgaatctttgtcttattacaatcagatcaactttagccactttaggattaagaaaaatgctctgccctcctcaaagtcattccctcactaggttgtctactgattaactagaatactgatactggaaaaaagagttttatgaaattttggaaacacacatgactcttaaattatcaaattttgtaatatttgtggaattattatagaaaaaaacttctcctgttttggcagcgtttcattaacaagtattatgagtttatttgtaaatgaaagtaatatttgctgtgttgcaggcctgcatgaatttcaatgacagtggagcatgtgttactcagtgtccccaaacctttgtctacaatccaaccacctttcaactggagcacaatttcaatgcaaagtacacatatggagcattctgtgtcaagaaatgtccacgtaagtaacagaataagaataaccaaattaattaggtcattatttgaaatcaaaagaattttatgtaagtttattttaatgtgaaacttgtaagaatattataagtactttgggtatagatactattgcccccattttataaataaagaaactaaaccaaaactttaaagtgatttgtgtcatttgactggaaatacaatttcaggttgagatatttaaacaaagagttgtttaagggtaagatacataaacactatcaatgatgctaatcatttttaaaccctaaaatatcttgttttgagcttgtttgctgaatgttaacattaatgcttattttaccttttttttttttttaatcagataactttgtggtagattccagttcttgtgtgcgtgcctgccctagttccaagatggaagtagaagaaaatgggattaaaatgtgtaaaccttgcactgacatttgcccaaaaggtgagtggtagctcagattatttagttagaactgggcctatataacaaggtttttaattcacttttaagtagaccaactttttaatataaacccactctcacaaccaaacctacccacacgctttccataattttgaacagttactcaaaatatgaacttttatagcactgtatattattcagaaccagtagtgaatgttgaacgaatgaataattattttactttttagaaaacaaaatttgtaatatattttatatgttacaattaaaaatactctgctattttataatgaagatgcaatgatttattggccaaaaataagtttctcaatcccctaactctgagtcttgtttctacagcttgtgatggcattggcacaggatcattgatgtcagctcagactgtggattccagtaacattgacaaattcataaactgtaccaagatcaatgggaatttgatctttctagtcactggtattcatgggtcagtattaaatttttgtgcaagttattttacaaagtgtagacaaaactgaagagattctttagttttgtttatttgattcctctggaagctgaagagtttcacctttcattaatgctcctcaccaacaaaagcaggggcctgatttcaccagcaatgacagtatactagttttggaataatttccacaaaacacctattattcctcctccacatctagcacagattaatttaaacatgcattgataacacccctactgctaattaaaattaaatttgaataaaatattgtcacatttctcatattttcaatcctttagtaaaatttaaatttggctacatctcttcttgattttctagggacccttacaatgcaattgaagccatagacccagagaaactgaacgtctttcggacagtcagagagataacaggtaattttttaaactgcaactgttgcgctatgaacaatataatttttttaaaaattacacaagattgactgggcatcgtggctcacaccagtaatcccagcacttagggaggttgaggcgggtggatcatgaggtcaggagatggaaatcctggccaacatggagaaaccctgtctctacgggtaggacactcaatcttggaagaatacatatgtaatagagtgcttaaaaaatagaaatgttcactacccctttctcacttcccaactttcaacacattttcaccatatttcaagaaaaatcagcactaatactaagacaatgatattctgatttattttttctactcttcacttgtaggtttcctgaacatacagtcatggccaccaaacatgactgacttcagtgttttttctaacctggtgaccattggtggaagagtactctataggtaagtggatatgtttaaagctgcagggctcacagatttcaagaggagcattgtgtgtgcattaagtcaaaactatcactcttattgatttactgattctggggaaatcatgcttccatccttatttccaaagataagctcaataaaaatacctccgatgatggtgtgaggtattacagaaggtcaaattattactttaaaaactgtatatagcatgtaaaaacaatattctaaacacagatttattgattcagtttccatttatacaccattaacattctttttaaaataaaatgtgacagccttattttactccggaatgcgtttcatggttccgttttctcacttccccctccttagtggcctgtccttgcttatcctcaagcaacagggcatcacctctctacagttccagtccctgaaggaaatcagcgcaggaaacatctatattactgacaacagcaacctgtgttattatcataccattaactggacaacactcttcagcacaatcaaccagagaatagtaatccgggacaacagaaaagctgaaaattgtagtaagtacattactcagacatttaaaacatagaaacttaaattttttcccattcttctttggaccaaacaattaaaaataacatccggtcagaattgttgctctgttatcccaacccttaaaaaggaaggtagttgttacaattaccaacatggtataaaataatcagaataagtgacttgactctgcaatatagaagaagttgtgggtaggatgggacatgacgatgggataggccaccaaagtcatttgccatatatctcttttaagtgaactcctttagaaatagcattacctaggaagattttaagttttgacacaatcctctgttttatttccccttgattttggtgtttcacagctgctgaaggaatggtgtgcaaccatctgtgttccagtgatggctgttggggacctgggccagaccaatgtctgtcgtgtcgccgcttcagtagaggaaggatctgcatagagtcttgtaacctctatgatgggtaaggcttcttctagggttgccttcacctcatgagctttgaaggactgattagttctgatttttttttttttttttttttttttgagacggagtctcgctctgtcgccctggctggagtgcagcggcacgatctcggctcactgcaagctccgcctcctgggttcacgccattctcctgcatctggctgcagtttatcttttctcctaatggaaaacttaatgtttctgatgctcctggcacatagagaaacaaactttagaatttactctgccaataggacttttagcagatgttacttcatttgttaagttgacgcttgtttgcttacacctcctcatgtggctgatgttttcacagtgaatttcgggagtttgagaatggctccatctgtgtggagtgtgacccccagtgtgagaagatggaagatggcctcctcacatgccatggaccggtaagcctgaagacatctgtggtgtgttggcttatttagtatcatgtatgaatgtttgttattattttatcatttattcatccattcaatagctacttacaggatgccatggggaaacatgtttatctgcctacaagaggcttaaagtttagtagtagagataaaatagttaaaaagtcgctttgcactgtttgtactacaaaaattacatccacatttgcactgctgaaaatgttctccaattctcttagaggaagatttgccacctactgaagtctcagtaactaaaccacatgaatacattccagaggaaatgacaccacttttcttttttctttttttttcgttttcacatttcagggtcctgacaactgtacaaagtgctctcattttaaagatggcccaaactgtgtggaaaaatgtccagatggcttacagggggcaaacagtttcattttcaagtatgctgatccagatcgggagtgccacccatgccatccaaactgcacccaagggtaagcattcttgctggccaagggctcacctggtatgtgttatccacatgtatctttatccctggtaccatctctgaaatgtataccattctcatagaactctactaatccttatatttaaaatgctgattttaagagaaatactgagagaatgatttatggaatcaactttgtacaccctgcattttctgcaggtgcataggctcaagtattgaagactgcatcggcctgatggataggtacttggtgtgcttgcttcccatgttcttcctccaaggctccatgtgtgagcactggtgcatgtgtgtgcatgtcactgtggatggagaatgatgttttctgttctgtaattgcctgcaggtgtaacggtcccactagtcatgactgcatttactacccatggacgggccattccactttaccacaacatgctaggtaacatctaccatgtttccattttgtcgctcaaatcctttcctagttatcatgaacaaaaagtactaaccagttgggttaaatttataatatattgtaactcataatatatcaaattggaaagttttgaaagaggcataaaacactttccttctcaagccaactttcttacttctttttgtttttaccatgagaaaggttttggtagagcaaaacctaatgcacttttatatttgcatttcatctaaatgactagatttgtgaaatgtggataatgtcttgtacaactgctcttttctcttcctctgtcttctctctcttcatactttttatttttttttttctcattctggttgtcagaactcccctgattgcagctggagtaattggtgggctcttcattctggtcattgtgggtctgacatttgctgtttatgttagaaggaagagcatcaaaaagaaaagagccttgagaagattcttggaaacagaggtgaggtatttctttctcctcttcatgtgtttggggattttcatcaggtttagaaggtttagatgatgttcaattatttaatccaagtaaaattctgttcagtgtcctaattaagttttttattttatagtccgttaaacaaagcttgtgaaaaatcagattatgttgtaaaaatagtcaataaatgtgtcagtgaatggtgagtggtgcatattacgaaggtattggttgtcaaggcaaaccaagttggtgtgtttttctttgtaagaaagagaaccaaagagagagagagagagagagacagagagagaggactgactatcggactgaaagtataaccttcttctttccgctttgcagttggtggaaccattaactcccagtggcacagcacccaatcaagctcaacttcgtattttgaaagaaactgagctgaagagggtaaaagtccttggctcaggtgcttttggaacggtttataaagtaagtaaaaaacaacgcatatcgttagttaagttttgttttagatgtttagaaaataatagccaatggagttattactttagacaacctaattttcttataatattcagaaaggaagacttttataatattgagaagttgctgcacaaatgaattcattaatttttattgaatgagctgtatgagcaacatcctcagataatgaaagcagacaacaaagttgcagagtaacttgtaacatgtaacaggtgctaaataaacatttgttgattgaatgttataatatcaaacttctaagttactttgtaagaacttaataggttgagatgtcatatttaatgtaaatttttttccccaaagggtatttgggtacctgaaggagaaactgtgaagattcctgtggctattaagattcttaatgagacaactggtcccaaggcaaatgtggagttcatggatgtaagtacagacacccaggcaatcacatttttctccattatcaaatagcctgcttagataattaaagcaaaacaaaaccaaactccacaacttacaaatttctcttatggaaatattataatcttataattaaagacatttctaagaccaattcacattgtattatactttttagatcacttttattgaatgaaatcactttaaagatagaataactgaaattatgtcttttcattttgattgattccattgagtaagagtacatttttaaaaatcatcagcaccattagtacaatccaagtaactctaaatctaagaaaatttgagttgaaatcatggtattgcatttttttcttacaggaagctctgatcatggcaagtatggatcatccacacctagtccggttgctgggtgtgtgtctgagcccaaccatccagctggttactcaacttatgccccatggctgcctgttggagtatgtccacgagcacaaggataacattggatcacaactgctgcttaactggtgtgtccagatagctaaggtaagtgcctgtcaatttctatggaaattacatttttaggttaatatttcctaacctggaacagttttcatattgaaaatatgttgtcttcccatttaaataaaataaagtatatttgctgcaatgaaagatacataacagagaggtacttttaggtaaactacagattaaatgcgtgatagctgtttgtggtttgctgtcccccaaatcaggttttctctaattttgaaaatattctaggattctggcttcacttaaaaaattaggcacttccaactgaaggctaagaaactttgttttagaaaaatgggaaaacctgggcattaactgaatatcattaaggaacttgatatttttcagggaatgatgtacctggaagaaagacgactcgttcatcgggatttggcagcccgtaatgtcttagtgaaatctccaaaccatgtgaaaatcacagattttgggctagccagactcttggaaggagatgaaaaagagtacaatgctgatggaggaaaggtgggtatctttttgagagcaatcttgcttgaaaatatagtataatatccttttatctccttatattttatacaagaaaccaataagcctgaagcttaggagattattaagccttggttctaccatttgcctcttctcctgccccgggtatatatatatgtgtgtgtatatatatatcatattaacatatatttatagttatagtcataaattaacatatatttatagttatagttatatctatacacacataataaaaaaatatgattaaggccagcccaaagactcacatttaggaaatacatatagaaatgaatttttaatgtaattttaaaacttttacttcttacttctctatagatgccaattaaatggatggctctggagtgtatacattacaggaaattcacccatcagagtgacgtttggagctatggtaaataaatcttctttgcgaattaaagcttgtaaagcaaaaatacatatgttaagttcatgtgaaatatcttaagctaaattattttgttgtgttataaatacctattgataagcctaatttcctaaagcagttaactctttgctttctcaatgaaaaaaaaatattttattttattttacaaagattttgacattggggttctcataatggatgcaggaatttatggagcttttttttttttaattgattggtgtttggattgacctgtaaggagtattcttttactactggtatagtgctggtttgttcaacatatgttgttaatatgcttaagtaagaattttttctccaatataggagttactatatgggaactgatgacctttggaggaaaaccctatgatggaattccaacgcgagaaatccctgatttattagagaaaggagaacgtttgcctcagcctcccatctgcactattgacgtttacatggtcatggtcaaatgtaagactgcaaaataatgttatcaccatcatcattcttagtaaagtaatagcagagattactcaatctgtacaacatttctctgtattgaaaaatacgacagttcaaaaacaattatgaaaggaacatatgaacgcctctttgttgtgactattattaatataaagtaatactcttccaacaaagagaccgataaagccttaccaattgagtcgtttctttcactagcttgctttctttctcagatcattacgattaaaacaacatttttcaaacttttgctcatattttcacaaaatttaaatttcaactcctttctagttacgaatatagtgacattttcactgtgtaaatttccaggttggatgattgatgctgacagtagacctaaatttaaggaactggctgctgagttttcaaggatggctcgagaccctcaaagatacctagttattcaggtgagtacatttgacttatgcctttaagactaggccaatggcaaactcactgcaaaatgagtagtatcaggactttggaactgtggaaaggaccacaaacatgttgattaattaagcagaattatcatgtgacatgacttatggaaaagagctttttatttcacgtcagatccacctttttttctaagcatgttataggtttcttaatggccggtggttgtgctaaagacttgtttttttaaaatgtgtgtatgaatttttcaaccatttgttatgatattacataaatttattgcagagaccacatatttaagataagaaagaatcatatttgtgtctgatgggcaatctttcttttagggtgatgatcgtatgaagcttcccagtccaaatgacagcaagttctttcagaatctcttggatgaagaggatttggaagatatgatggatgctgaggagtacttggtccctcaggctttcaacatcccacctcccatctatacttccagagcaagaattgactcgaatagggtaagaaataattatatacacatatcatattctttctgagatataaaatcatgtaatagttcataagcactaacatttcaaaataattatatagctcaaatcaatgtgatgcctagattaaaaatataccatacccacaaaagatgtgccaatcttgctatatgtagttaattttggaagataagcttgcttatggtcagaatgcatacaattgtgctgcttaggaagcttcactgttgtgcactttttcccctttggttcatacgacccatgtggcttttctttttcgtttctttttttaattttttcattcatattgcctcttattatatccatcattccatttttctttcctattagagtgaaattggacacagccctcctcctgcctacacccccatgtcaggagtaagtatttcacaatcaaccttcatcttttaggattttcggtctttgcttaccatgtttcctctctcgtctctgcataatttcctcattttgcctttgccaacagtgagttaagaatttggtgtacatcgtgtagctgcctttgtagatgtgtttttatctcagctgataatccgaaataagtggaaattttaggtgtttatagtttgtaactccattagccactaggggaaaaaaaaccagtaaatactatgactattctctgaaagactggctttgatatccttgtggctattaacattcatttttaaactatttctaacaacgccttctctccacatatgtttctcttattaacagaaccagtttgtataccgagatggaggttttgctgctgaacaaggagtgtctgtgccctacagagccccaactagcacaattccagaagctcctgtggcacagggtgctactgctgagatttttgatgactcctgctgtaatggcaccctacgcaagccagtggcaccccatgtccaagaggacagtagcacccagaggtacagtgctgaccccaccgtgtttgccccagaacggagcccacgaggagagctggatgaggaaggttacatgactcctatgcgagacaaacccaaacaaggtatgaactgattattcagaaacgatcgccattcgaagttcacttccatcaagataaacaaagtacagaatagaaattgccagatagctgaccagcacaacatttgtgatccagtaaaggcctaggctactgctacttgtagtatggtccctgaatcagcagcatccacattatttattaccacttactctttttttcataagacaatggtgatccacaaatacttgttgtgagaaatcatgaaaacaaatctgtgggtttttttgttctagacaaagaagctaaccattatgtataaccttggtctgattaatattttccagaaactagaggttagctgatatttttttattcctttagaatacctgaatccagtggaggagaacccttttgtttctcggagaaaaaatggagaccttcaagcattggataatcccgaatatcacaatgcatccaatggtccacccaaggccgaggatgagtatgtgaatgagccactgtacctcaacacctttgccaacaccttgggaaaagctgagtacctgaagaacaacatactgtcaatgccagagaaggccaagaaagcgtttgacaaccctgactactggaaccacagcctgccacctcggagcacccttcagcacccagactacctgcaggagtacagcacaaaatatttttataaacagaatgggcggatccggcctattgtggcagagaatcctgaatacctctctgagttctccctgaagccaggcactgtgctgccgcctccaccttacagacaccggaatactgtggtgtaagctcagttgtggttttttaggtggagagacacacctgctccaatttccccacccccctctctttctctggtggtcttccttctaccccaaggccagtagttttgacacttcccagtggaagatacagagatgcaatgatagttatgtgcttacctaacttgaacattagagggaaagactgaaagagaaagataggaggaaccacaatgtttcttcatttctctgcatgggttggtcaggagaatgaaacagctagagaaggaccagaaaatgtaaggcaatgctgcctactatcaaactagctgtcactttttttctttttctttttctttctttgtttctttcttcctcttcttttttttttttttttttaaagcagatggttgaaacacccatgctatctgttcctatctgcaggaactgatgtgtgcatatttagcatccctggaaatcataataaagtttccattagaacaaaagaataacattttctataacatatgatggtgtctgaaattgagaatccagtttctttccccagcagtttctgtcctagcaagtaagaatggccaactcaactttcataatttaaaaatctccattaaagttataactagtaattatgttttcaacactttttggtttttttcattttgttttgctctgaccgattcctttatatttgctcccctatttttggctttaatttctaattgcaaagatgtttacatcaaagcttcttcacagaatttaagcaagaaatattttaatatagtgaaatggccactactttaagtatacaatctttaaaataagaaagggaggctaatatttttcatgctatcaaattatcttcaccctcatcctttacatttttcaacatttttttttctccataaatgacactacttgataggccgttggttgtctgaagagtagaagggaaactaagagacagttctctgtggttcaggaaaactactgatactttcaggggtggcccaatgagggaatccattgaactggaagaaacacactggattgggtatgtctacctggcagatactcagaaatgtagtttgcacttaagctgtaattttatttgttctttttctgaactccattttggattttgaatcaagcaatatggaagcaaccagcaaattaactaatttaagtacatttttaaaaaaagagctaagataaagactgtggaaatgccaaaccaagcaaattaggaaccttgcaacggtatccagggactatgatgagaggccagcacattatcttcatatgtcacctttgctacgcaaggaaatttgttcagttcgtatacttcgtaagaaggaatgcgagtaaggattggcttgaattccatggaatttctagtatgagactatttatatgaagtagaaggtaactctttgcacataaattggtataataaaaagaaaaacacaaacattcaaagcttagggataggtccttgggtcaaaagttgtaaataaatgtgaaacatcttctcatgcaattattttattatccaacacactaatcttttgatactttatataattccctttcttcatatactgcatccagtactagaaccatcattattatgtatcattttgaaagaatacctgatgagatgaaggatgagaacaaatgacagagatgagtctccaagtaaagggggcctcac

SEQ ID NO: 404 - DNA, 12536 bp, Homo sapiens
  misc_feature 1..12536: note = IGF1-R genomic DNA
  source 1..12536: mol_type = genomic DNA
ggggccgccccgcgccgcccgccccgtccgcgcacccggagggccccggcggcgccgccttcggagtattgtttccttcgcccttgtttttggagggggagcgaagactgagtttgagacttgtttcctttcatttcctttttttcttttcttttcttttttttttttttttttttttttgagaaaggggaatttcatcccaaataaaaggaatgaagtctggctccggaggagggtccccgacctcgctgtgggggctcctgtttctctccgccgcgctctcgctctggccgacgagtggagaaagtgagtatgtgcccgccgcccgcggccactgcgggaacttttcctccgaggggctgcgccctgtttgcgaaacccgagttgccaccgtcgcagctgtcgggcccccgggctcgggagcggcggggtggggcgcagggcggctctgccgggagggaggctgcagcggacccgggacccggggctaactggttagccacctaaactgtcagtctgcaacccacagctctgcagtgaacaattgaacctcatttctttaataataatacaggattcctgaaaaccaactgtattattgtttggaaaatagtttaaaaattatttccttctaactgagacgtttaccctcttgtctcccttcagtctgcgggccaggcatcgacatccgcaacgactatcagcagctgaagcgcctggagaactgcacggtgatcgagggctacctccacatcctgctcatctccaaggccgaggactaccgcagctaccgcttccccaagctcacggtcattaccgagtacttgctgctgttccgagtggctggcctcgagagcctcggagacctcttccccaacctcacggtcatccgcggctggaaactcttctacaactacgccctggtcatcttcgagatgaccaatctcaaggatattgggctttacaacctgaggaacattactcggggggccatcaggattgagaaaaatgctgacctctgttacctctccactgtggactggtccctgatcctggatgcggtgtccaataactacattgtggggaataagcccccaaaggaatgtggggacctgtgtccagggaccatggaggagaagccgatgtgtgagaagaccaccatcaacaatgagtacaactaccgctgctggaccacaaaccgctgccagaaaagtaagaatgatgctgactgctgctttctctctgcctctctctctcctctcctcctccttgacctcccttctcttctgagtgcacgagttccgctgggcagggtgcagtcgtgttgcatttaggacgtggcatgcctgctgtgcggaagtggttcccagtgggggtcttggttggctttccagtggatgaaaggacagtggtgggggtgaggatttcgtagtgtgtttttgcattgtctcctcaatgagtgatctggtgctggtggtagcagtgaatgacccagaaggatgctggccaggcccagagaaggcggtgcctcccctgcccggtctcatctccgtctctcctctctctccacagtgtgcccaagcacgtgtgggaagcgggcgtgcaccgagaacaatgagtgctgccaccccgagtgcctgggcagctgcagcgcgcctgacaacgacacggcctgtgtagcttgccgccactactactatgccggtgtctgtgtgcctgcctgcccgcccaacacctacaggtttgagggctggcgctgtgtggaccgtgacttctgcgccaacatcctcagcgccgagagcagcgactccgaggggtttgtgatccacgacggcgagtgcatgcaggagtgcccctcgggcttcatccgcaacggcagccagaggtcagtcgcggccacacgtgtggtcactacccgccccacctcacccgccaccctagcacacaaaggtagactctgtcggttgtttcatccgggtgcagccctcaggaagttcactgaggtgggtcattttgagagggctggcttaccttaaatgtttggtgagattctaggaacaattggtggcttatcttgggtgggcttgggggtgagataccatgtgaccacatgaacacttcaaaacagttgctttttctaatgcatgctgtaataacaatgaaaagcatatccttatggtttttttaatgcaagaagacagactcaattatgtgtgtttttgattttttttttcttcttcaacagcatgtactgcatcccttgtgaaggtccttgcccgaaggtctgtgaggaagaaaagaaaacaaagaccattgattctgttacttctgctcagatgctccaaggatgcaccatcttcaagggcaatttgctcattaacatccgacgggggagtaagtattccatccccctggaaaaacggctagatctcatggttttcttttgttgatgcttttcatgctcccgtccctgagtcaccactaaaatatgggcttagataaacaacatggtgtgtaagcctcacgcatgacgtctcttctttgagtttccctgaaagataaagaacagattgaagtcgttgttgagagtcaagccagggaagtgtgtttttgtcagggagcagccagtcctgtgctgggagcatctcagggggcacctgccgttgaattgttctcacttgtgtttgtaagaatccaagtatgtcacccttacaccaagtgagcacacagtgacacaatcccctttcaatgtagataacattgcttcagagctggagaacttcatggggctcatcgaggtggtgacgggctacgtgaagatccgccattctcatgccttggtctccttgtccttcctaaaaaaccttcgcctcatcctaggagaggagcagctagaagggtaagtgccccaaatttcatgagctgacgttctattacaaaataagcagcgtgcttatgaaactgtgttgctgaggtaagagccctccctgccttgttaaagagaagaaaggaggaagccgcagtattgcctgtgctgctcgagtaggtcttgggtggagtcatggttctccattcttagttgctgccattgttaacagcaactgtctgttctcctatagtgttaataactaaatctcttattggcaaaggaaatgtattgtggagcaggtggcaaagaggacctgtgttacgtggccagcaggctagaggggactgtggccaagggcaggtgcgctaacatcgatttctgtgcttctaggaattactccttctacgtcctcgacaaccagaacttgcagcaactgtgggactgggaccaccgcaacctgaccatcaaagcagggaaaatgtactttgctttcaatcccaaattatgtgtttccgaaatttaccgcatggaggaagtgacggggactaaagggcgccaaagcaaaggggacataaacaccaggaacaacggggagagagcctcctgtgagtgacagcatccaaaacaccgtgggcccaaccatcatgataacagcagaccctcctcccatgtgtgatggcagctttcctctgcggcccctcctggtttcacatgggggaccactagaccatcttaactagcactttgctcctacttatatgtcatcacaatcagtagtgggcagagctctgcatagtgaaatgtatgatttcttagtggaaaacgagaaagccactgaggaagcccagaagggaacttagcatatacagccagctttggggaagggggaagcagtgccaagcaagacaggtgcttttcagagacacatgaatctctgtcactcacggatgtactctttgccccaggtgaaagtgacgtcctgcatttcacctccaccaccacgtcgaagaatcgcatcatcataacctggcaccggtaccggccccctgactacagggatctcatcagcttcaccgtttactacaaggaagcgtgagtttctgctttgggtgatgccattctgttgacagggctacgaatgggagaggccagtctttcgatccttgaatgggctggctgaatacagggggtcagcagagtccccagggagagccacgccaaacatccctacttcatcctcatgcaccctctcgggctgtccctgtgatgtcacccgactggggaagcccagagtccagtcacttcatttcttcttctataaaagtctaattgattatttgtttatttagacctcccattatagaaagtgtgacatgctgggcctctggggaagatttttgagggttttgatgtcagagccccgaactttctctgaacttaattgtctttcagaccctttaagaatgtcacagagtatgatgggcaggatgcctgcggctccaacagctggaacatggtggacgtggacctcccgcccaacaaggacgtggagcccggcatcttactacatgggctgaagccctggactcagtacgccgtttacgtcaaggctgtgaccctcaccatggtggagaacgaccatatccgtggggccaagagtgagatcttgtacattcgcaccaatgcttcaggtatccatgcctagacaagcccccagcatccacacttcttcgcaagctcactggccttgcttgtaccaggtgtcattgtagggttagcagtgagctatgcctgttgtctttcttgtcaataggtaatactgtgtcatattcatttccccactgctaacacattaggctcttctgtgccattggcatttatagtagtactatttcaaaataaggttcacttttcactttgtatttcattgttcattgttattttcttatccaggtcaaactggcagtttcctgttggcttgccagagtatctgatagcctgactcttaagttcatttcattttctagaatgttctttgttcccctctccagttccttccattcccttggacgttctttcagcatcgaactcctcttctcagttaatcgtgaagtggaaccctccctctctgcccaacggcaacctgagttactacattgtgcgctggcagcggcagcctcaggacggctacctttaccggcacaattactgctccaaaggtaagggtgcagcagcggcctggacggagggtgtgaccgttcattcctgtggttgtaatgtgcctgagccctaatattacacgtatcagacaacagtgtagttctccattggaaaccagctatcttctggttttttttttttttttttgagacagagtctcactctgttgcccaggctggcctcaggtgatttgcccgcctcggcctcccaaagtgctgggattatagccttgagccaccacatctggccgagaccagctatcttcttgattaaaggtactgagagctattatttttccttacaagcatgtataacggctttcattcccactcttgttttggcttttcttttccgagaagacaaaatccccatcaggaagtatgccgacggcaccatcgacattgaggaggtcacagagaaccccaagactgaggtgtgtggtggggagaaagggccttgctgcgcctgccccaaaactgaagccgagaagcaggccgagaaggaggaggctgaataccgcaaagtctttgagaatttcctgcacaactccatcttcgtgcccaggtacccagctcatgtgaaatttcagttggcaaaacccactgctcaggccggttctgttgcctttctccccaccaggtagtgtgtaagtcagcagctggggggtacaatacagtagccactgagacggagccgaaaaagatgacaggttcggtgaagtgagtccctgcggaagccagtcagagtagagaaagcaagataatgaggaaggacatccctgtgttattcatgagttcttacctaagggggctcaatagctccttctattccacggttaagattcttctgttactcttactcaagtcatagaaaagacaaaagaggtaaaagtacttaaaagccacatttctctcctccttgcagacctgaaaggaagcggagagatgtcatgcaagtggccaacaccaccatgtccagccgaagcaggaacaccacggccgcagacacctacaacatcaccgacccggaagagctggagacagagtaccctttctttgagagcagagtggataacaaggagagaactgtcatttctaaccttcggcctttcacattgtaccgcatcgatatccacagctgcaaccacgaggctgagaagctgggctgcagcgcctccaacttcgtctttgcaaggactatgcccgcaggtatggtatgatccagctggccccattgccaccttcctcacaacctagtggagaagatgtgttttatggacacagggtctgacacccagggccatgacccttagacccaggcctgcctgctaaataacgtgcagtcattggcaggtggcgtgtagaccagctgcccagggaacagagcccgtgtacgtggctgatctccactgtcctgcccgcgtggatgggggcgttattctcagtgtacgtggctgatctccactgtcctgcccgtgtggatgggggggttattctcaggtcagcccagtgttggcctccctccctgggaacccaaatccaactttgtcacctgtttaaattgtacagaaggagcagatgacattcctgggccagtgacctgggagccaaggcctgaaaactccatctttttaaagtggccggaacctgagaatcccaatggattgattctaatgtatgaaataaaatacggatcacaagttgaggtaggactggggcagtggcccgtgcctgcatgtacttccatccattgacagcatatgctacctgactgcacaggttacctcctggttagcataggacttaaaacaataaaatccatgccaagttggtgaggatttgggtctttctacccactctgtactctccaaggagtactgcatagtaagctacttgaagacgaccttttaagatttgatttctttgtctttactgacactcaggatcattgttaggtgggaggtcagatcaggcagctggagtccccagtgtggtgagtttagttggcaggccccagatttctcctgcattcatgggaaattgacatgtatgttttatttccccaggatcagcgagaatgtgtgtccagacaggaatacaggaagtatggaggggccaagctaaaccggctaaacccggggaactacacagcccggattcaggccacatctctctctgggaatgggtcgtggacagatcctgtgttcttctatgtccaggccaaaagtaaggcttgtggagggagaagaaacgtggtaaaactgaaagcagggtggtccaggatcaggacagcccgagtgttcatggctgtcttattttctgttaaaatggagttggccagcttccagaagggtcatgctaaggtgccggcacataccggcactgtgtgtgaaaggttgggcagggtaattgtttgtttgccgtgttctatttctgacaccatttaccttcaggaattcttactgtatgatggggagtaaacgaatatacaggtatttttttcatacttccaactgaatgtgaagaaatgaaatgagcaaattgttcacctggtgatattttatcatttcctcctctttgctgcagcaggatatgaaaacttcatccatctgatcatcgctctgcccgtcgctgtcctgttgatcgtgggagggttggtgattatgctgtacgtcttccatagaaagaggtcagtgatgtgcaaagttatgacactttctgtggctgagtggtttgatgatttgaatgtgagtgaaggtgatatttttgaagatttcaaggaaatattttatggactggaaaacctgattttcccatcaaatgttcttccaggaaaagagaaccttttctaatgattttaacaacagccggctcacccaggcctgaattgggagtgtagacaagagctgctgtagacagtaagctctccccattctgttctgataccgtgtgagagaggataaatgaaactgttgtagcgaagatgaaagtatatacaggaatgtatggaggtggggttttgttaacgtgaatttaatctttttgacagaaataacagcaggctggggaatggagtgctgtatgcctctgtgaacccggagtacttcagcgctgctgatggtaagagtccgggccaccagcactgccagcgtgcagggcaggtagatcgggagctttcaggagggttgctaatttgggaaaggaaggaggtttgcattattttgagctacctttggccttggatctgtcttcattaatatttctttctttctttttttttttaatcaaagtttttagcagttttcttactcaaatctatagcatgtggaaagttgacatcaagccatgccatcgcctcctggtattctctgtgggtttaaggaagcagcatcttatattctttggcttagagttcccccaaagcacgttctgtctaagggcttgtttctgtacctgctttaattacggtttcttctccagtgtacgttcctgatgagtgggaggtggctcgggagaagatcaccatgagccgggaacttgggcaggggtcgtttgggatggtctatgaaggagttgccaagggtgtggtgaaagatgaacctgaaaccagagtggccattaaaacagtgaacgaggccgcaagcatgcgtgagaggattgagtttctcaacgaagcttctgtgatgaaggagttcaattgtcaccatgtggtaagagaaagttcctgaaaagccaaaatgcagcacagggagagggtatcacacaagcctcccagtatgttcttggctgcatgtacccgtgggtttggtgtcttgcctttgccttctggatagttaccccattacctcactgctaccttcagacccctgtgctcagaccaggccgcagcagtacccgtgggtttggtgtcttgcctttgccttctggatagttaccccattacctcactgctaccttcagacccctgtgctcagaccaggccgcagcaccacagagacagttccagacaacacaggcatcagcaagggccacctgaccctctgagtctttctctttttgattcctcccaggtgcgattgctgggtgtggtgtcccaaggccagccaacactggtcatcatggaactgatgacacggggcgatctcaaaagttatctccggtctctgaggccagaaatggaggtcagttttcatttccaccggtattgcatgttgcctggcctgctctcttttcctttataatctccctgcaaggaaatgctgtgtctttaaatcagtttactttccagcatccagtgtttcttactgcatgctcagttgtaggtcatttatgcaaaggatttccccaactagagtcagactgagcaagcaggtgccatgctctccatgatggtttgttccttccgagcaagtcctggtttcttagcataaacaacccacggtgcccagattgaacaaagatgatatgcaaacctcgaaagaaattggcatggaaaaaaaaaatccaaaattctcatgtgaatttttttaaatctccaacagaataatccagtcctagcacctccaagcctgagcaagatgattcagatggccggagagattgcagacggcatggcatacctcaacgccaataagttcgtccacagagaccttgctgcccggaattgcatggtagccgaagatttcacagtcaaaatcggaggtgtgtccttagctttccaggtctgggcaagaactaaactcaggtgttttgaggactttgttggcattagtctgcccctggagaggttttctagtgtgtcccttgagtgcacggactccttcttgggaatgatgtgattgtctccagttgatggtcacaaacctggcacggtcggtcccaatcatcccttactgtctccaccttataaaattgcaaaccctaatatttggccaccttaaagtgggacgtgtctgtgtcttgccttgcgtctctccacacataatgagtgtagggtcctctgctgtgacagcagtggtgcctgctccagcgtgtgactctgcgccctctcttcccttacagattttggtatgacgcgagatatctatgagacagactattaccggaaaggagggaaagggctgctgcccgtgcgctggatgtctcctgagtccctcaaggatggagtcttcaccacttactcggacgtctggtatgagaacctttactgcattgccagcctggagcccccagcctctgcactttccaccagctcagtctctagggctttatctttctctgttcattgttacccgttgccagctttagctcagtgttgtgtgagccacacttcttcatcattgaggtgttcctgttgtcagtgggctagctagcaacagagggaggatgatatcccgcacttagcccagggcctggctcgctgtctgacaagcactgtcaccatagtaaggacagtttatctgctcgggatgtaagaagtgctggaaaggagggggcagcattgttcagtccatccctttccaagctcctcacagtttttttctccctgtaggtccttcggggtcgtcctctgggagatcgccacactggccgagcagccctaccagggcttgtccaacgagcaagtccttcgcttcgtcatggagggcggccttctggacaagccagacaactgtcctgacatgctgtacgtacttcctgggccctccgtgctcttctgagttctcttctcaaatacctgttttcttgggtcacaggagattaggagattaaagccattctctctggtcctgcgcctcccttgccaggcgtggctaagaggtttgtccttgtggaaggagctgagtgggttggtcgacctgtgcttgactctgaaggccacttggccatccaggcagaaagccagggatggagaggggcagcagggctgtgttcagtgctcccgccgtacgcttgtatgcgggaaaccactgcaggcggcccatgaagcctcctggccatgtgcgccctcccggtttggaccccctcccgtgtgtcttggctgcaggtttgaactgatgcgcatgtgctggcagtataaccccaagatgaggccttccttcctggagatcatcagcagcatcaaagaggagatggagcctggcttccgggaggtctccttctactacagcgaggagaacaagctgcccgagccggaggagctggacctggagccagagaacatggagagcgtccccctggacccctcggcctcctcgtcctccctgccactgcccgacagacactcaggacacaaggccgagaacggccccggccctggggtgctggtcctccgcgccagcttcgacgagagacagccttacgcccacatgaacgggggccgcaagaacgagcgggccttgccgctgccccagtcttcgacctgctgatccttggatcctgaatctgtgcaaacagtaacgtgtgcgcacgcgcagcggggtggggggggagagagagttttaacaatccattcacaagcctcctgtacctcagtggatcttcagaactgcccttgctgcccgcgggagacagcttctctgcagtaaaacacatttgggatgttccttttttcaatatgcaagcagctttttattccctgcccaaacccttaactgacatgggcctttaagaaccttaatgacaacacttaatagcaacagagcacttgagaaccagtctcctcactctgtccctgtccttccctgttctccctttctctctcctctctgcttcataacggaaaaataattgccacaagtccagctgggaagccctttttatcagtttgaggaagtggctgtccctgtggccccatccaaccactgtacacacccgcctgacaccgtgggtcattacaaaaaaacacgtggagatggaaatttttacctttatctttcacctttctagggacatgaaatttacaaagggccatcgttcatccaaggctgttaccattttaacgctgcctaattttgccaaaatcctgaactttctccctcatcggcccggcgctgattcctcgtgtccggaggcatgggtgagcatggcagctggttgctccatttgagagacacgctggcgacacactccgtccatccgactgcccctgctgtgctgctcaaggccacaggcacacaggtctcattgcttctgactagattattatttgggggaactggacacaataggtctttctctcagtgaaggtggggagaagctgaaccggcttccctgccctgcctccccagccccctgcccaacccccaagaatctggtggccatgggccccgaagcagcctggcggacaggcttggagtcaaggggccccatgcctgcttctctcccagccccagctcccccgcccgcccccaaggacacagatgggaaggggtttccagggactcagc

SEQ ID NO: 405 - protein, 65 aa, synthetic construct
  REGION 1..65: note = retained HF210
CSQFLRGQECVEECRVLQGLPREYVNARHCLPCHPECQPQNGSVTCFGPEADQCVACAHYKDPPF

SEQ ID NO: 406 - protein, 866 aa, synthetic construct
  REGION 1..866: note = HFD100T (His tagged)
LEEKKVCQGTSNKLTQLGTFEDHFLSLQRMFNNCEVVLGNLEITYVQRNYDLSFLKTIQEVAGYVLIALNTVERIPLENLQIIRGNMYYENSYALAVLSNYDANKTGLKELPMRNLQEILHGAVRFSNNPALCNVESIQWRDIVSSDFLSNMSMDFQNHLGSCQKCDPSCPNGSCWGAGEENCQKLTKIICAQQCSGRCRGKSPSDCCHNQCAAGCTGPRESDCLVCRKFRDEATCKDTCPPLMLYNPTTYQMDVNPEGKYSFGATCVKKCPRNYVVTDHGSCVRACGADSYEMEEDGVRKCKKCEGPCRKVCNGIGIGEFKDSLSINATNIKHFKNCTSISGDLHILPVAFRGDSFTHTPPLDPQELDILKTVKEITGFLLIQAWPENRTDLHAFENLEIIRGRTKQHGQFSLAVVSLNITSLGLRSLKEISDGDVIISGNKNLCYANTINWKKLFGTSGQKTKIISNRGENSCKATGQVCHALCSPEGCWGPEPRDCVSCRNVSRGRECVDKCNLLEGEPREFVENSECIQCHPECLPQAMNITCTGRGPDNCIQCAHYIDGPHCVKTCPAGVMGENNTLVWKYADAGHVCHLCHPNCTYGCTGPGLEGCPTNGPKIPSLEGRMDPKSCDKTHTCPPCPAPELLGGPSVFLFPPKPKDTLMISRTPEVTCVVVDVSHEDPEVKFNWYVDGVEVHNAKTKPREEQYNSTYRVVSVLTVLHQDWLNGKEYKCKVSNKALPAPIEKTISKAKGQPREPQVYTLPPSREEMTKNQVSLTCLVKGFYPSDIAVEWESNGQPENNYKTTPPVLDSDGSFFLYSKLTVDKSRWQQGNVFSCSVMHEALHNHYTQKSLSLSPGKTGHHHHHH

SEQ ID NO: 407 - protein, 866 aa, synthetic construct [sequence omitted]

SEQ ID NO: 408 - protein, 678 aa, synthetic construct
  REGION 1..678: note = HER2 variant I
MELAALCRWGLLLALLPPGAASTQVCTGTDMKLRLPASPETHLDMLRHLYQGCQVVQGNLELTYLPTNASLSFLQDIQEVQGYVLIAHNQVRQVPLQRLRIVRGTQLFEDNYALAVLDNGDPLNNTTPVTGASPGGLRELQLRSLTEILKGGVLIQRNPQLCYQDTILWKDIFHKNNQLALTLIDTNRSRACHPCSPMCKGSRCWGESSEDCQSLTRTVCAGGCARCKGPLPTDCCHEQCAAGCTGPKHSDCLACLHFNHSGICELHCPALVTYNTDTFESMPNPEGRYTFGASCVTACPYNYLSTDVGSCTLVCPLHNQEVTAEDGTQRCEKCSKPCARVCYGLGMEHLREVRAVTSANIQEFAGCKKIFGSLAFLPESFDGDPASNTAPLQPEQLQVFETLEEITGYLYISAWPDSLPDLSVFQNLQVIRGRILHNGAYSLTLQGLGISWLGLRSLRELGSGLALIHHNTHLCFVHTVPWDQLFRNPHQALLHTANRPEDECVGEGLACHQLCARGHCWGPGPTQCVNCSQFLRGQECVEECRVLQGLPREYVNARHCLPCHPECQPQNGSVTCFGPEADQCVACAHYKDPPFCVARCPSGVKPDLSYMPIWKFPDEEGACQPCPINCTHSCVDLDDKGCPAEQRARLAWTPGCTLHCPSLPHWMLGGHCCREGTP

SEQ ID NO: 409 - protein, 575 aa, synthetic construct
  REGION 1..575: note = HER2 variant II
MELAALCRWGLLLALLPPGAASTQVCTGTDMKLRLPASPETHLDMLRHLYQGCQVVQGNLELTYLPTNASLSFLQDIQEVQGYVLIAHNQVRQVPLQRLRIVRGTQLFEDNYALAVLDNGDPLNNTTPVTGASPGGLRELQLRSLTEILKGGVLIQRNPQLCYQDTILWKDIFHKNNQLALTLIDTNRSRACHPCSPMCKGSRCWGESSEDCQSLTRTVCAGGCARCKGPLPTDCCHEQCAAGCTGPKHSDCLACLHFNHSGICELHCPALVTYNTDTFESMPNPEGRYTFGASCVTACPYNYLSTDVGSCTLVCPLHNQEVTAEDGTQRCEKCSKPCARVCYGLGMEHLREVRAVTSANIQEFAGCKKIFGSLAFLPESFDGDPASNTAPLQPEQLQVFETLEEITGYLYISAWPDSLPDLSVFQNLQVIRGRILHNGAYSLTLQGLGISWLGLRSLRELGSGLALIHHNTHLCFVHTVPWDQLFRNPHQALLHTANRPEDECGKTGSPVCALPICQHTAVPRGPWQQRSWTCADCPSLCTLLDSAQLWLAWPLGMASLAGSYLPWHPSLPLCF

SEQ ID NO: 410 - protein, 1294 aa, synthetic construct
  REGION 1..1294: note = HER2 variant III
MELAALCRWGLLLALLPPGAASTQVCTGTDMKLRLPASPETHLDMLRHLYQGCQVVQGNLELTYLPTNASLSFLQDIQEVQGYVLIAHNQVRQVPLQRLRIVRGTQLFEDNYALAVLDNGDPLNNTTPVTGASPGGLRELQLRSLTEILKGGVLIQRNPQLCYQDTILWKDIFHKNNQLALTLIDTNRSRACHPCSPMCKGSRCWGESSEDCQSLTRTVCAGGCARCKGPLPTDCCHEQCAAGCTGPKHSDCLACLHFNHSGICELHCPALVTYNTDTFESMPNPEGRYTFGASCVTACPYNYLSTDVGSCTLVCPLHNQEVTAEDGTQRCEKCSKPCARVCYGLGMEHLREVRAVTSANIQEFAGCKKIFGSLAFLPESFDGVSLCQQAGVQWYDLGSLQPLPPGFKQFSCLSLLSSWDYRDPASNTAPLQPEQLQVFETLEEITGYLYISAWPDSLPDLSVFQNLQVIRGRILHNGAYSLTLQGLGISWLGLRSLRELGSGLALIHHNTHLCFVHTVPWDQLFRNPHQALLHTANRPEDECVGEGLACHQLCARGHCWGPGPTQCVNCSQFLRGQECVEECRVLQGLPREYVNARHCLPCHPECQPQNGSVTCFGPEADQCVACAHYKDPPFCVARCPSGVKPDLSYMPIWKFPDEEGACQPCPINCTHSCVDLDDKGCPAEQRASPLTSIVSAVVGILLVVVLGVVFGILIKRRQQKIRKYTMRRLLQETELVEPLTPSGAMPNQAQMRILKETELRKVKVLGSGAFGTVYKGIWIPDGENVKIPVAIKVLRENTSPKANKEILDEAYVMAGVGSPYVSRLLGICLTSTVQLVTQLMPYGCLLDHVRENRGRLGSQDLLNWCMQIAKGMSYLEDVRLVHRDLAARNVLVKSPNHVKITDFGLARLLDIDETEYHADGGKVPIKWMALESILRRRFTHQSDVWSYGVTVWELMTFGAKPYDGIPAREIPDLLEKGERLPQPPICTIDVYMIMVKCWMIDSECRPRFRELVSEFSRMARDPQRFVVIQNEDLGPASPLDSTFYRSLLEDDDMGDLVDAEEYLVPQQGFFCPDPAPGAGGMVHHRHRSSSTRSGGGDLTLGLEPSEEEAPRSPLAPSEGAGSDVFDGDLGMGAAKGLQSLPTHDPSPLQRYSEDPTVPLPSETDGYVAPLTCSPQPEYVNQPDVRPQPPSPREGPLPAARPAGATLERAKTLSPGKNGVVKDVFAFGGAVENPEYLTPQGGAAPQPHPPPAFSPAFDNLYYWDQDPPERGAPPSTFKGTPTAENPEYLGLDVPV

SEQ ID NO: 411 - protein, 717 aa, synthetic construct
  REGION 1..717: note = HER2 variant IV
MELAALCRWGLLLALLPPGAASTQVCTGTDMKLRLPASPETHLDMLRHLYQGCQVVQGNLELTYLPTNASLSFLQDIQEVQGYVLIAHNQVRQVPLQRLRIVRGTQLFEDNYALAVLDNGDPLNNTTPVTGASPGGLRELQLRSLTEILKGGVLIQRNPQLCYQDTILWKDIFHKNNQLALTLIDTNRSRACHPCSPMCKGSRCWGESSEDCQSLTRTVCAGGCARCKGPLPTDCCHEQCAAGCTGPKHSDCLACLHFNHSGICELHCPALVTYNTDTFESMPNPEGRYTFGASCVTACPYNYLSTDVGSCTLVCPLHNQEVTAEDGTQRCEKCSKPCARVCYGLGMEHLREVRAVTSANIQEFAGCKKIFGSLAFLPESFDGVSLCQQAGVQWYDLGSLQPLPPGFKQFSCLSLLSSWDYRDPASNTAPLQPEQLQVFETLEEITGYLYISAWPDSLPDLSVFQNLQVIRGRILHNGAYSLTLQGLGISWLGLRSLRELGSGLALIHHNTHLCFVHTVPWDQLFRNPHQALLHTANRPEDECVGEGLACHQLCARGHCWGPGPTQCVNCSQFLRGQECVEECRVLQGLPREYVNARHCLPCHPECQPQNGSVTCFGPEADQCVACAHYKDPPFCVARCPSGVKPDLSYMPIWKFPDEEGACQPCPINCTHSCVDLDDKGCPAEQRARLAWTPGCTLHCPSLPHWMLGGHCCREGTP

SEQ ID NO: 412 - protein, 614 aa, synthetic construct
  REGION 1..614: note = HER2 variant V
MELAALCRWGLLLALLPPGAASTQVCTGTDMKLRLPASPETHLDMLRHLYQGCQVVQGNLELTYLPTNASLSFLQDIQEVQGYVLIAHNQVRQVPLQRLRIVRGTQLFEDNYALAVLDNGDPLNNTTPVTGASPGGLRELQLRSLTEILKGGVLIQRNPQLCYQDTILWKDIFHKNNQLALTLIDTNRSRACHPCSPMCKGSRCWGESSEDCQSLTRTVCAGGCARCKGPLPTDCCHEQCAAGCTGPKHSDCLACLHFNHSGICELHCPALVTYNTDTFESMPNPEGRYTFGASCVTACPYNYLSTDVGSCTLVCPLHNQEVTAEDGTQRCEKCSKPCARVCYGLGMEHLREVRAVTSANIQEFAGCKKIFGSLAFLPESFDGVSLCQQAGVQWYDLGSLQPLPPGFKQFSCLSLLSSWDYRDPASNTAPLQPEQLQVFETLEEITGYLYISAWPDSLPDLSVFQNLQVIRGRILHNGAYSLTLQGLGISWLGLRSLRELGSGLALIHHNTHLCFVHTVPWDQLFRNPHQALLHTANRPEDECGKTGSPVCALPICQHTAVPRGPWQQRSWTCADCPSLCTLLDSAQLWLAWPLGMASLAGSYLPWHPSLPLCF

SEQ ID NO: 413 - protein, 387 aa, synthetic construct
  REGION 1..387: note = HER2 variant VI
MELAALCRWGLLLALLPPGAASTQVCTGTDMKLRLPASPETHLDMLRHLYQGCQVVQGNLELTYLPTNASLSFLQDIQEVQGYVLIAHNQVRQVPLQRLRIVRGTQLFEDNYALAVLDNGDPLNNTTPVTGASPGGLRELQLRSLTEILKGGVLIQRNPQLCYQDTILWKDIFHKNNQLALTLIDTNRSRACHPCSPMCKGSRCWGESSEDCQSLTRTVCAGGCARCKGPLPTDCCHEQCAAGCTGPKHSDCLACLHFNHSGICELHCPALVTYNTDTFESMPNPEGRYTFGASCVTACPYNYLSTDVGSCTLVCPLHNQEVTAEDGTQRCEKCSKPCARGTQPPTLPRSSQSSSKCLRLWKRSQVTYTSQHGRTACLTSASSRTCK

SEQ ID NO: 414 - protein, 1210 aa, Homo sapiens
  REGION 1..1210: note = epidermal growth factor receptor S442F (HER1) ECD 25-645
MRPSGTAGAALLALLAALCPASRALEEKKVCQGTSNKLTQLGTFEDHFLSLQRMFNNCEVVLGNLEITYVQRNYDLSFLKTIQEVAGYVLIALNTVERIPLENLQIIRGNMYYENSYALAVLSNYDANKTGLKELPMRNLQEILHGAVRFSNNPALCNVESIQWRDIVSSDFLSNMSMDFQNHLGSCQKCDPSCPNGSCWGAGEENCQKLTKIICAQQCSGRCRGKSPSDCCHNQCAAGCTGPRESDCLVCRKFRDEATCKDTCPPLMLYNPTTYQMDVNPEGKYSFGATCVKKCPRNYVVTDHGSCVRACGADSYEMEEDGVRKCKKCEGPCRKVCNGIGIGEFKDSLSINATNIKHFKNCTSISGDLHILPVAFRGDSFTHTPPLDPQELDILKTVKEITGFLLIQAWPENRTDLHAFENLEIIRGRTKQHGQFSLAVVFLNITSLGLRSLKEISDGDVIISGNKNLCYANTINWKKLFGTSGQKTKIISNRGENSCKATGQVCHALCSPEGCWGPEPRDCVSCRNVSRGRECVDKCNLLEGEPREFVENSECIQCHPECLPQAMNITCTGRGPDNCIQCAHYIDGPHCVKTCPAGVMGENNTLVWKYADAGHVCHLCHPNCTYGCTGPGLEGCPTNGPKIPSIATGMVGALLLLLVVALGIGLFMRRRHIVRKRTLRRLLQERELVEPLTPSGEAPNQALLRILKETEFKKIKVLGSGAFGTVYKGLWIPEGEKVKIPVAIKELREATSPKANKEILDEAYVMASVDNPHVCRLLGICLTSTVQLITQLMPFGCLLDYVREHKDNIGSQYLLNWCVQIAKGMNYLEDRRLVHRDLAARNVLVKTPQHVKITDFGLAKLLGAEEKEYHAEGGKVPIKWMALESILHRIYTHQSDVWSYGVTVWELMTFGSKPYDGIPASEISSILEKGERLPQPPICTIDVYMIMVKCWMIDADSRPKFRELIIEFSKMARDPQRYLVIQGDERMHLPSPTDSNFYRALMDEEDMDDVVDADEYLIPQQGFFSSPSTSRTPLLSSLSATSNNSTVACIDRNGLQSCPIKEDSFLQRYSSDPTGALTEDSIDDTFLPVPEYINQSVPKRPAGSVQNPVYHNQPLNPAPSRDPHYQDPHSTAVGNPEYLNTVQPTCVNSTFDSPAHWAQKGSHQISLDNPDYQQDFFPKEAKPNGIFKGSTAENAEYLRVAPQSSEFIGA

SEQ ID NO: 415 - protein, 1186 aa, Homo sapiens
  REGION 1..1186: note = Mature human EGFR/HER1 (minus the signal peptide)
  DOMAIN 1..621: note = Extracellular domain (ECD)
  DOMAIN 1..165: note = domain I of ECD
  DOMAIN 166..313: note = domain II of ECD
  DOMAIN 314..481: note = domain III of ECD
  DOMAIN 482..621: note = domain IV of ECD
LEEKKVCQGTSNKLTQLGTFEDHFLSLQRMFNNCEVVLGNLEITYVQRNYDLSFLKTIQEVAGYVLIALNTVERIPLENLQIIRGNMYYENSYALAVLSNYDANKTGLKELPMRNLQEILHGAVRFSNNPALCNVESIQWRDIVSSDFLSNMSMDFQNHLGSCQKCDPSCPNGSCWGAGEENCQKLTKIICAQQCSGRCRGKSPSDCCHNQCAAGCTGPRESDCLVCRKFRDEATCKDTCPPLMLYNPTTYQMDVNPEGKYSFGATCVKKCPRNYVVTDHGSCVRACGADSYEMEEDGVRKCKKCEGPCRKVCNGIGIGEFKDSLSINATNIKHFKNCTSISGDLHILPVAFRGDSFTHTPPLDPQELDILKTVKEITGFLLIQAWPENRTDLHAFENLEIIRGRTKQHGQFSLAVVSLNITSLGLRSLKEISDGDVIISGNKNLCYANTINWKKLFGTSGQKTKIISNRGENSCKATGQVCHALCSPEGCWGPEPRDCVSCRNVSRGRECVDKCNLLEGEPREFVENSECIQCHPECLPQAMNITCTGRGPDNCIQCAHYIDGPHCVKTCPAGVMGENNTLVWKYADAGHVCHLCHPNCTYGCTGPGLEGCPTNGPKIPSIATGMVGALLLLLVVALGIGLFMRRRHIVRKRTLRRLLQERELVEPLTPSGEAPNQALLRILKETEFKKIKVLGSGAFGTVYKGLWIPEGEKVKIPVAIKELREATSPKANKEILDEAYVMASVDNPHVCRLLGICLTSTVQLITQLMPFGCLLDYVREHKDNIGSQYLLNWCVQIAKGMNYLEDRRLVHRDLAARNVLVKTPQHVKITDFGLAKLLGAEEKEYHAEGGKVPIKWMALESILHRIYTHQSDVWSYGVTVWELMTFGSKPYDGIPASEISSILEKGERLPQPPICTIDVYMIMVKCWMIDADSRPKFRELIIEFSKMARDPQRYLVIQGDERMHLPSPTDSNFYRALMDEEDMDDVVDADEYLIPQQGFFSSPSTSRTPLLSSLSATSNNSTVACIDRNGLQSCPIKEDSFLQRYSSDPTGALTEDSIDDTFLPVPEYINQSVPKRPAGSVQNPVYHNQPLNPAPSRDPHYQDPHSTAVGNPEYLNTVQPTCVNSTFDSPAHWAQKGSHQISLDNPDYQQDFFPKEAKPNGIFKGSTAENAEYLRVAPQSSEFIGA

SEQ ID NO: 416 - protein, 1323 aa, Homo sapiens
  REGION 1..1323: note = Mature human HER3 (ErbB3) protein (minus the signal peptide)
  DOMAIN 1..621: note = Extracellular domain (ECD)
  DOMAIN 1..166: note = domain I of ECD
  DOMAIN 167..311: note = domain II of ECD
  DOMAIN 312..480: note = domain III of ECD
  DOMAIN 481..621: note = domain IV of ECD
SEVGNSQAVCPGTLNGLSVTGDAENQYQTLYKLYERCEVVMGNLEIVLTGHNADLSFLQWIREVTGYVLVAMNEFSTLPLPNLRVVRGTQVYDGKFAIFVMLNYNTNSSHALRQLRLTQLTEILSGGVYIEKNDKLCHMDTIDWRDIVRDRDAEIVVKDNGRSCPPCHEVCKGRCWGPGSEDCQTLTKTICAPQCNGHCFGPNPNQCCHDECAGGCSGPQDTDCFACRHFNDSGACVPRCPQPLVYNKLTFQLEPNPHTKYQYGGVCVASCPHNFVVDQTSCVRACPPDKMEVDKNGLKMCEPCGGLCPKACEGTGSGSRFQTVDSSNIDGFVNCTKILGNLDFLITGLNGDPWHKIPALDPEKLNVFRTVREITGYLNIQSWPPHMHNFSVFSNLTTIGGRSLYNRGFSLLIMKNLNVTSLGFRSLKEISAGRIYISANRQLCYHHSLNWTKVLRGPTEERLDIKHNRPRRDCVAEGKVCDPLCSSGGCWGPGPGQCLSCRNYSRGGVCVTHCNFLNGEPREFAHEAECFSCHPECQPMEGTATCNGSGSDTCAQCAHFRDGPHCVSSCPHGVLGAKGPIYKYPDVQNECRPCHENCTQGCKGPELQDCLGQTLVLIGKTHLTMALTVIAGLVVIFMMLGGTFLYWRGRRIQNKRAMRRYLERGESIEPLDPSEKANKVLARIFKETELRKLKVLGSGVFGTVHKGVWIPEGESIKIPVCIKVIEDKSGRQSFQAVTDHMLAIGSLDHAHIVRLLGLCPGSSLQLVTQYLPLGSLLDHVRQHRGALGPQLLLNWGVQIAKGMYYLEEHGMVHRNLAARNVLLKSPSQVQVADFGVADLLPPDDKQLLYSEAKTPIKWMALESIHFGKYTHQSDVWSYGVTVWELMTFGAEPYAGLRLAEVPDLLEKGERLAQPQICTIDVYMVMVKCWMIDENIRPTFKELANEFTRMARDPPRYLVIKRESGPGIAPGPEPHGLTNKKLEEVELEPELDLDLDLEAEEDNLATTTLGSALSLPVGTLNRPRGSQSLLSPSSGYMPMNQGNLGESCQESAVSGSSERCPRPVSLHPMPRGCLASESSEGHVTGSEAELQEKVSMCRSRSRSRSPRPRGDSAYHSQRHSLLTPVTPLSPPGLEEEDVNGYVMPDTHLKGTPSSREGTLSSVGLSSVLGTEEEDEDEEYEYMNRRRRHSPPHPPRPSSLEELGYEYMDVGSDLSASLGSTQSCPLHPVPIMPTAGTTPDEDYEYMNRQRDGGGPGGDYAAMGACPASEQGYEEMRAFQGPGHQAPHVHYARLKTLRSLEATDSAFDNPDYWHSRLFPKANAQRT

SEQ ID NO: 417 - protein, 16 aa, synthetic construct
  REGION 1..16: note = cyclic FcRnBP
QRFCTGHFGGLYPCNG

SEQ ID NO: 418 - protein, 16 aa, synthetic construct
  REGION 1..16: note = cyclic FcRnBP
QRFCTGHFGGLHPCNG

SEQ ID NO: 419 - protein, 16 aa, synthetic construct
  REGION 1..16: note = linear FcRnBP
QRFVTGHFGGLYPANG

SEQ ID NO: 420 - protein, 16 aa, synthetic construct
  REGION 1..16: note = linear FcRnBP
QRFVTGHFGGLHPANG

SEQ ID NO: 421 - protein, 330 aa, Homo sapiens [sequence omitted]

SEQ ID NO: 422 - protein, 326 aa, Homo sapiens; identical to SEQ ID NO: 164
  REGION 1..326: note = Human IgG2 Heavy chain constant domain
  DOMAIN 1..98: note = CH1
  DOMAIN 99..110: note = hinge region
  DOMAIN 111..219: note = CH2
  DOMAIN 220..326: note = CH3

SEQ ID NO: 423 - protein, 327 aa, Homo sapiens; identical to SEQ ID NO: 166
  REGION 1..327: note = IgG4 Heavy chain constant domain
  DOMAIN 1..98: note = CH1
  DOMAIN 99..110: note = Hinge region
  DOMAIN 111..220: note = CH2
  DOMAIN 221..327: note = CH3

SEQ ID NO: 424 - protein, 1233 aa, Homo sapiens
  REGION 1..1233: note = Mature human HER2 (ErbB2) Protein (minus the signal peptide)
  DOMAIN 1..628: note = Extracellular domain (ECD)
  DOMAIN 1..172: note = domain I of ECD
  DOMAIN 173..319: note = domain II of ECD
  DOMAIN 320..488: note = domain III of ECD
  DOMAIN 489..628: note = domain IV of ECD
TQVCTGTDMKLRLPASPETHLDMLRHLYQGCQVVQGNLELTYLPTNASLSFLQDIQEVQGYVLIAHNQVRQVPLQRLRIVRGTQLFEDNYALAVLDNGDPLNNTTPVTGASPGGLRELQLRSLTEILKGGVLIQRNPQLCYQDTILWKDIFHKNNQLALTLIDTNRSRACHPCSPMCKGSRCWGESSEDCQSLTRTVCAGGCARCKGPLPTDCCHEQCAAGCTGPKHSDCLACLHFNHSGICELHCPALVTYNTDTFESMPNPEGRYTFGASCVTACPYNYLSTDVGSCTLVCPLHNQEVTAEDGTQRCEKCSKPCARVCYGLGMEHLREVRAVTSANIQEFAGCKKIFGSLAFLPESFDGDPASNTAPLQPEQLQVFETLEEITGYLYISAWPDSLPDLSVFQNLQVIRGRILHNGAYSLTLQGLGISWLGLRSLRELGSGLALIHHNTHLCFVHTVPWDQLFRNPHQALLHTANRPEDECVGEGLACHQLCARGHCWGPGPTQCVNCSQFLRGQECVEECRVLQGLPREYVNARHCLPCHPECQPQNGSVTCFGPEADQCVACAHYKDPPFCVARCPSGVKPDLSYMPIWKFPDEEGACQPCPINCTHSCVDLDDKGCPAEQRASPLTSIISAVVGILLVVVLGVVFGILIKRRQQKIRKYTMRRLLQETELVEPLTPSGAMPNQAQMRILKETELRKVKVLGSGAFGTVYKGIWIPDGENVKIPVAIKVLRENTSPKANKEILDEAYVMAGVGSPYVSRLLGICLTSTVQLVTQLMPYGCLLDHVRENRGRLGSQDLLNWCMQIAKGMSYLEDVRLVHRDLAARNVLVKSPNHVKITDFGLARLLDIDETEYHADGGKVPIKWMALESILRRRFTHQSDVWSYGVTVWELMTFGAKPYDGIPAREIPDLLEKGERLPQPPICTIDVYMIMVKCWMIDSECRPRFRELVSEFSRMARDPQRFVVIQNEDLGPASPLDSTFYRSLLEDDDMGDLVDAEEYLVPQQGFFCPDPAPGAGGMVHHRHRSSSTRSGGGDLTLGLEPSEEEAPRSPLAPSEGAGSDVFDGDLGMGAAKGLQSLPTHDPSPLQRYSEDPTVPLPSETDGYVAPLTCSPQPEYVNQPDVRPQPPSPREGPLPAARPAGATLERPKTLSPGKNGVVKDVFAFGGAVENPEYLTPQGGAAPQPHPPPAFSPAFDNLYYWDQDPPERGAPPSTFKGTPTAENPEYLGLDVPV

SEQ ID NO: 425 - protein, 1283 aa, Homo sapiens
  REGION 1..1283: note = Mature human HER4 (ErbB4) protein (minus the signal peptide)
  DOMAIN 1..625: note = Extracellular domain (ECD)
  DOMAIN 1..163: note = domain I of ECD
  DOMAIN 164..308: note = domain II of ECD
  DOMAIN 309..477: note = domain III of ECD
  DOMAIN 478..625: note = domain IV of ECD
QSVCAGTENKLSSLSDLEQQYRALRKYYENCEVVMGNLEITSIEHNRDLSFLRSVREVTGYVLVALNQFRYLPLENLRIIRGTKLYEDRYALAIFLNYRKDGNFGLQELGLKNLTEILNGGVYVDQNKFLCYADTIHWQDIVRNPWPSNLTLVSTNGSSGCGRCHKSCTGRCWGPTENHCQTLTRTVCAEQCDGRCYGPYVSDCCHRECAGGCSGPKDTDCFACMNFNDSGACVTQCPQTFVYNPTTFQLEHNFNAKYTYGAFCVKKCPHNFVVDSSSCVRACPSSKMEVEENGIKMCKPCTDICPKACDGIGTGSLMSAQTVDSSNIDKFINCTKINGNLIFLVTGIHGDPYNAIEAIDPEKLNVFRTVREITGFLNIQSWPPNMTDFSVFSNLVTIGGRVLYSGLSLLILKQQGITSLQFQSLKEISAGNIYITDNSNLCYYHTINWTTLFSTINQRIVIRDNRKAENCTAEGMVCNHLCSSDGCWGPGPDQCLSCRRFSRGRICIESCNLYDGEFREFENGSICVECDPQCEKMEDGLLTCHGPGPDNCTKCSHFKDGPNCVEKCPDGLQGANSFIFKYADPDRECHPCHPNCTQGCNGPTSHDCIYYPWTGHSTLPQHARTPLIAAGVIGGLFILVIVGLTFAVYVRRKSIKKKRALRRFLETELVEPLTPSGTAPNQAQLRILKETELKRVKVLGSGAFGTVYKGIWVPEGETVKIPVAIKILNETTGPKANVEFMDEALIMASMDHPHLVRLLGVCLSPTIQLVTQLMPHGCLLEYVHEHKDNIGSQLLLNWCVQIAKGMMYLEERRLVHRDLAARNVLVKSPNHVKITDFGLARLLEGDEKEYNADGGKMPIKWMALECIHYRKFTHQSDVWSYGVTIWELMTFGGKPYDGIPTREIPDLLEKGERLPQPPICTIDVYMVMVKCWMIDADSRPKFKELAAEFSRMARDPQRYLVIQGDDRMKLPSPNDSKFFQNLLDEEDLEDMMDAEEYLVPQAFNIPPPIYTSRARIDSNRSEIGHSPPPAYTPMSGNQFVYRDGGFAAEQGVSVPYRAPTSTIPEAPVAQGATAEIFDDSCCNGTLRKPVAPHVQEDSSTQRYSADPTVFAPERSPRGELDEEGYMTPMRDKPKQEYLNPVEENPFVSRRKNGDLQALDNPEYHNASNGPPKAEDEYVNEPLYLNTFANTLGKAEYLKNNILSMPEKAKKAFDNPDYWNHSLPPRSTLQHPDYLQEYSTKYFYKQNGRIRPIVAENPEYLSEFSLKPGTVLPPPPYRHRNTVV

SEQ ID NO: 426 - protein, 1210 aa, Homo sapiens [sequence omitted]

SEQ ID NO: 427 - protein, 4 aa, synthetic construct
  REGION 1..4: note = GS linker
GSGS

SEQ ID NO: 428 - protein, 5 aa, synthetic construct
  REGION 1..5: note = GS linker
GGGGS

SEQ ID NO: 429 - protein, 15 aa, synthetic construct
  REGION 1..15: note = GS linker
GGGGSGGGGSGGGGS

SEQ ID NO: 430 - protein, 20 aa, synthetic construct
  REGION 1..20: note = GS linker
GGGGSGGGGSGGGGSGGGGS

SEQ ID NO: 431 - protein, 8 aa, synthetic construct
  REGION 1..8: note = GS linker
GSGGSSGG

SEQ ID NO: 432 - protein, 12 aa, synthetic construct
  REGION 1..12: note = GS linker
GSSSGSGSGSSG

SEQ ID NO: 433 - protein, 13 aa, synthetic construct
  REGION 1..13: note = GS linker
GSSSGSGSGSSGG

SEQ ID NO: 434 - protein, 6 aa, synthetic construct
  REGION 1..6: note = GS linker
GGSSGG

SEQ ID NO: 435 - protein, 13 aa, synthetic construct
  REGION 1..13: note = GS linker
GGSSGGSGGSSSG

SEQ ID NO: 436 - protein, 18 aa, synthetic construct
  REGION 1..18: note = GS linker
GSSSGSGSGGSSSGSGSG

SEQ ID NO: 437 - protein, 18 aa, synthetic construct
  REGION 1..18: note = GS linker
GGSSGGSSGGGSSGGSSG

SEQ ID NO: 438 - protein, 6 aa, synthetic construct
  REGION 1..6: note = GS linker
GSSSGS

SEQ ID NO: 439 - protein, 12 aa, synthetic construct
  REGION 1..12: note = linker sequence
GSAGSAAGSGEF

SEQ ID NO: 440 - protein, 18 aa, synthetic construct
  REGION 1..18: note = linker sequence
KESGSVSSEQLAQFRSLD

SEQ ID NO: 441 - protein, 14 aa, synthetic construct
  REGION 1..14: note = linker sequence
EGKSSGSGSESKST

SEQ ID NO: 442 - protein, 5 aa, synthetic construct
  REGION 1..5: note = Alpha helix-forming linker, (EAAAK)n
  REPEAT 1..5: note = occuring n times, where n= 1 to 10
EAAAK

SEQ ID NO: 443 - protein, 7 aa, synthetic construct
  REGION 1..7: note = rigid linker, A(EAAAK)nA, where n = 2 to 5
  REPEAT 2..6: note = occurring 2, 3, 4, or 5 times
AEAAAKA

SEQ ID NO: 444 - protein, 18 aa, synthetic construct
  REGION 1..18: note = C-terminal extension from human IgG linker
ELQLEESSAEAQDGELDG

SEQ ID NO: 445 - protein, 14 aa, synthetic construct
  REGION 1..14: note = C-terminal extension from human IgG variant linker
ELQLEESSAEAQGG

SEQ ID NO: 446 - protein, 31 aa, synthetic construct
  REGION 1..31: note = stalk region of TNF that can be used as a linker in scTNFR2-Fc
GPQREEFPRDLSLISPLAQAVRSSSRTPSDK

SEQ ID NO: 447 - protein, 6 aa, synthetic construct
  REGION 1..6: note = partial trastuzumab hinge sequence
SCDKTH

SEQ ID NO: 448 - protein, 15 aa, synthetic construct
  REGION 1..15: note = trastuzumab hinge sequence
EPKSCDKTHTCPPCP

SEQ ID NO: 449 - protein, 12 aa, synthetic construct
  REGION 1..12: note = nivolumab hinge sequence
ESKYGPPCPPCP

SEQ ID NO: 450 - protein, 450 aa, synthetic construct
  REGION 1..450: note = Trastuzumab heavy chain
  DOMAIN 1..120: note = VH
  DOMAIN 121..218: note = CH1
  DOMAIN 219..233: note = hinge region
  DOMAIN 234..343: note = CH2
  DOMAIN 344..450: note = CH3
EVQLVESGGGLVQPGGSLRLSCAASGFNIKDTYIHWVRQAPGKGLEWVARIYPTNGYTRYADSVKGRFTISADTSKNTAYLQMNSLRAEDTAVYYCSRWGGDGFYAMDYWGQGTLVTVSSASTKGPSVFPLAPSSKSTSGGTAALGCLVKDYFPEPVTVSWNSGALTSGVHTFPAVLQSSGLYSLSSVVTVPSSSLGTQTYICNVNHKPSNTKVDKKVEPKSCDKTHTCPPCPAPELLGGPSVFLFPPKPKDTLMISRTPEVTCVVVDVSHEDPEVKFNWYVDGVEVHNAKTKPREEQYNSTYRVVSVLTVLHQDWLNGKEYKCKVSNKALPAPIEKTISKAKGQPREPQVYTLPPSREEMTKNQVSLTCLVKGFYPSDIAVEWESNGQPENNYKTTPPVLDSDGSFFLYSKLTVDKSRWQQGNVFSCSVMHEALHNHYTQKSLSLSPGK

SEQ ID NO: 451 - protein, 440 aa, synthetic construct
  REGION 1..440: note = Nivolumab heavy chain
  DOMAIN 1..113: note = VH
  DOMAIN 114..221: note = CH1
  DOMAIN 212..223: note = Hinge region
  DOMAIN 224..333: note = CH2
  DOMAIN 334..440: note = CH3
QVQLVESGGGVVQPGRSLRLDCKASGITFSNSGMHWVRQAPGKGLEWVAVIWYDGSKRYYADSVKGRFTISRDNSKNTLFLQMNSLRAEDTAVYYCATNDDYWGQGTLVTVSSASTKGPSVFPLAPCSRSTSESTAALGCLVKDYFPEPVTVSWNSGALTSGVHTFPAVLQSSGLYSLSSVVTVPSSSLGTKTYTCNVDHKPSNTKVDKRVESKYGPPCPPCPAPEFLGGPSVFLFPPKPKDTLMISRTPEVTCVVVDVSQEDPEVQFNWYVDGVEVHNAKTKPREEQFNSTYRVVSVLTVLHQDWLNGKEYKCKVSNKGLPSSIEKTISKAKGQPREPQVYTLPPSQEEMTKNQVSLTCLVKGFYPSDIAVEWESNGQPENNYKTTPPVLDSDGSFFLYSRLTVDKSRWQEGNVFSCSVMHEALHNHYTQKSLSLSLGK

SEQ ID NO: 452 - protein, 217 aa, Homo sapiens
  REGION 1..217: note = IgG1 Fc (CH2 and CH3 domains)
APELLGGPSVFLFPPKPKDTLMISRTPEVTCVVVDVSHEDPEVKFNWYVDGVEVHNAKTKPREEQYNSTYRVVSVLTVLHQDWLNGKEYKCKVSNKALPAPIEKTISKAKGQPREPQVYTLPPSRDELTKNQVSLTCLVKGFYPSDIAVEWESNGQPENNYKTTPPVLDSDGSFFLYSKLTVDKSRWQQGNVFSCSVMHEALHNHYTQKSLSLSPGK

SEQ ID NO: 453 - protein, 217 aa, synthetic construct
  REGION 1..217: note = Trastuzumab Fc (CH2 and CH3 domains)
APELLGGPSVFLFPPKPKDTLMISRTPEVTCVVVDVSHEDPEVKFNWYVDGVEVHNAKTKPREEQYNSTYRVVSVLTVLHQDWLNGKEYKCKVSNKALPAPIEKTISKAKGQPREPQVYTLPPSREEMTKNQVSLTCLVKGFYPSDIAVEWESNGQPENNYKTTPPVLDSDGSFFLYSKLTVDKSRWQQGNVFSCSVMHEALHNHYTQKSLSLSPGK

SEQ ID NO: 454 - protein, 217 aa, Homo sapiens
  REGION 1..217: note = IgG4 Fc (CH2 and CH3 domains)
APEFLGGPSVFLFPPKPKDTLMISRTPEVTCVVVDVSQEDPEVQFNWYVDGVEVHNAKTKPREEQFNSTYRVVSVLTVLHQDWLNGKEYKCKVSNKGLPSSIEKTISKAKGQPREPQVYTLPPSQEEMTKNQVSLTCLVKGFYPSDIAVEWESNGQPENNYKTTPPVLDSDGSFFLYSRLTVDKSRWQEGNVFSCSVMHEALHNHYTQKSLSLSLGK

SEQ ID NO: 455 - protein, 217 aa, synthetic construct; identical to SEQ ID NO: 454
  REGION 1..217: note = Nivolumab Fc (CH2 and CH3 domains)

SEQ ID NO: 456 - protein, 444 aa, synthetic construct
  REGION 1..444: note = ATROSAB heavy chain
  DOMAIN 1..115: note = VH
  DOMAIN 116..218: note = CH1
  DOMAIN 219..234: note = Hinge region
  DOMAIN 235..337: note = CH2
  DOMAIN 338..444: note = CH3
QVQLVQSGAEVKKPGSSVKVSCKASGYTFTDFYINWVRQAPGQGLEWIGEIYPYSGHAYYNEKFKARVTITADKSTSTAYMELSSLRSEDTAVYYCARWDFLDYWGQGTTVTVSSASTKGPSVFPLAPSSKSTSGGTAALGCLVKDYFPEPVTVSWNSGALTSGVHTFPAVLQSSGLYSLSSVVTVPSSSLGTQTYICNVNHKPSNTKVDKKVEPKSCDKTHTCPPCPAPPVAGPSVFLFPPKPKDTLMISRTPEVTCVVVDVSHEDPEVKFNWYVDGVEVHNAKTKPREEQYNSTYRVVSVLTVLHQDWLNGKEYKCKVSNKGLPSSIEKTISKAKGQPREPQVYTLPPSRDELTKNQVSLTCLVKGFYPSDIAVEWESNGQPENNYKTTPPVLDSDGSFFLYSKLTVDKSRWQQGNVFSCSVMHEALHNHYTQKSLSLSPGK

SEQ ID NO: 457 - DNA, 40 bp, synthetic construct
  misc_feature 1..40: note = EGFR-F1
  source 1..40: mol_type = other DNA
aattcgtacgaccgccaccatgggaccctccgggacggcc

SEQ ID NO: 458 - DNA, 51 bp, synthetic construct
  misc_feature 1..51: note = EGFR650-R1
  source 1..51: mol_type = other DNA
ggggaccactttgtacaagaaagctgggtctaggacgggatcttaggccca

SEQ ID NO: 459 - DNA, 43 bp, synthetic construct
  misc_feature 1..43: note = EGFRmu01- R2
  source 1..43: mol_type = other DNA
ctctggaggctgagaaaatgttcttcaaaagtgcccaactgcg

SEQ ID NO: 460 - DNA, 43 bp, synthetic construct
  misc_feature 1..43: note = EGFRmu02- R2
  source 1..43: mol_type = other DNA
ctctggaggctgagaaaatgattttcaaaagtgcccaactgcg

SEQ ID NO: 461 - DNA, 45 bp, synthetic construct
  misc_feature 1..45: note = EGFRmu04- R2
  source 1..45: mol_type = other DNA
tgagaaaatgatcttcaaaagtgttcaactgcgtgagcttgttac

SEQ ID NO: 462 - DNA, 43 bp, synthetic construct
  misc_feature 1..43: note = EGFRmu03- R2
  source 1..43: mol_type = other DNA
ctctggaggctgagaaaatgttgttcaaaagtgcccaactgcg

SEQ ID NO: 463 - DNA, 55 bp, synthetic construct
  misc_feature 1..55: note = EGFRmu05- R2
  source 1..55: mol_type = other DNA
ctctggaggctgagaaaatgttcttcaaaagtgttcaactgcgtgagcttgttac

SEQ ID NO: 464 - DNA, 44 bp, synthetic construct
  misc_feature 1..44: note = EGFRmu06- R2
  source 1..44: mol_type = other DNA
aaaatgatcttcaaaagtgcccacctgcgtgagcttgttactcg

SEQ ID NO: 465 - DNA, 44 bp, synthetic construct
  misc_feature 1..44: note = EGFRmu07- R2
  source 1..44: mol_type = other DNA
gaaaatgatcttcaaaagtgccaatctgcgtgagcttgttactc

SEQ ID NO: 466 - DNA, 42 bp, synthetic construct
  misc_feature 1..42: note = EGFRmu08- R2
  source 1..42: mol_type = other DNA
gaattcgctccactgtgttgacggcaatgaggacataaccag

SEQ ID NO: 467 - DNA, 42 bp, synthetic construct
  misc_feature 1..42: note = EGFRmu09- R2
  source 1..42: mol_type = other DNA
gaattcgctccactgtgttgatggcaatgaggacataaccag

SEQ ID NO: 468 - DNA, 44 bp, synthetic construct
  misc_feature 1..44: note = EGFRmu10- R2
  source 1..44: mol_type = other DNA
aaagatcataattcctctgcacccaggtaatttccaaattccca

SEQ ID NO: 469 - DNA, 46 bp, synthetic construct
  misc_feature 1..46: note = EGFRmu11- R2
  source 1..46: mol_type = other DNA
ctgctaaggcataggaattttcccagtacatatttcctctgatgat

SEQ ID NO: 470 - DNA, 44 bp, synthetic construct
  misc_feature 1..44: note = EGFRmu12- R2
  source 1..44: mol_type = other DNA
gactgctaaggcataggaattatcgtagtacatatttcctctga

SEQ ID NO: 471 - DNA, 45 bp, synthetic construct
  misc_feature 1..45: note = EGFRmu13- R2
  source 1..45: mol_type = other DNA
actgctaaggcataggaattttggtagtacatatttcctctgatg

SEQ ID NO: 472 - DNA, 45 bp, synthetic construct
  misc_feature 1..45: note = EGFRmu14- R2
  source 1..45: mol_type = other DNA
ggttttatttgcatcatagttagctaagactgctaaggcatagga

SEQ ID NO: 473 - DNA, 45 bp, synthetic construct
  misc_feature 1..45: note = EGFRmu15- R2
  source 1..45: mol_type = other DNA
ggttttatttgcatcatagttagttaagactgctaacgcatagga

SEQ ID NO: 474 - DNA, 43 bp, synthetic construct
  misc_feature 1..43: note = EGFRmu16- R2
  source 1..43: mol_type = other DNA
ggctgagaaaatgatcttcaaatttgcccaactgcgtgagctt

SEQ ID NO: 475 - DNA, 43 bp, synthetic construct
  misc_feature 1..43: note = EGFRmu17- R2
  source 1..43: mol_type = other DNA
ggctgagaaaatgatcttcaaattggcccaactgcgtgagctt

SEQ ID NO: 476 - DNA, 42 bp, synthetic construct
  misc_feature 1..42: note = EGFRmu18- R2
  source 1..42: mol_type = other DNA
ggctgagaaaatgatcttcaaaaatgcccaactgcgtgagct

SEQ ID NO: 477 - DNA, 43 bp, synthetic construct
  misc_feature 1..43: note = EGFRmu19- R2
  source 1..43: mol_type = other DNA
ggctgagaaaatgatcttcaaaatcgcccaactgcgtgagctt

SEQ ID NO: 478 - DNA, 43 bp, synthetic construct
  misc_feature 1..43: note = EGFRmu20- R2
  source 1..43: mol_type = other DNA
ggctgagaaaatgatcttcaaaatagcccaactgcgtgagctt

SEQ ID NO: 479 - DNA, 43 bp, synthetic construct
  misc_feature 1..43: note = EGFRmu21- R2
  source 1..43: mol_type = other DNA
ggctgagaaaatgatcttcaaaaccgcccaactgcgtgagctt

SEQ ID NO: 480 - DNA, 43 bp, synthetic construct
  misc_feature 1..43: note = EGFRmu22- R2
  source 1..43: mol_type = other DNA
ggctgagaaaatgatcttcaaaaaggcccaactgcgtgagctt

SEQ ID NO: 481 - DNA, 44 bp, synthetic construct
  misc_feature 1..44: note = EGFRmu23- R2
  source 1..44: mol_type = other DNA
gaacatcctctggaggctggcaaaatgatcttcaaaagtgccca

SEQ ID NO: 482 - DNA, 45 bp, synthetic construct
  misc_feature 1..45: note = EGFRmu24- R2
  source 1..45: mol_type = other DNA
ttgaacatcctctggagggtgcaaaaatgatcttcaaaagtcccc

SEQ ID NO: 483 - DNA, 45 bp, synthetic construct
  misc_feature 1..45: note = EGFRmu25- R2
  source 1..45: mol_type = other DNA
ttattgaacatcctctggagggtgagaaaatgatcttcaaaagtg

SEQ ID NO: 484 - DNA, 45 bp, synthetic construct
  misc_feature 1..45: note = EGFRmu26- R2
  source 1..45: mol_type = other DNA
tattgaacatcctctggaggaggagaaaatgatctccaaaagtgc

SEQ ID NO: 485 - DNA, 49 bp, synthetic construct
  misc_feature 1..49: note = EGFRmu27- R2
  source 1..49: mol_type = other DNA
gttattgaacatcctctggaggagggcaaaatgatcttcaaaagtgccc

SEQ ID NO: 486 - DNA, 49 bp, synthetic construct
  misc_feature 1..49: note = EGFRmu28- R2
  source 1..49: mol_type = other DNA
gttattgaacatcctctggagttgggcaaaatgatcttcaaaagtgccc

SEQ ID NO: 487 - DNA, 46 bp, synthetic construct
  misc_feature 1..46: note = EGFRmu29- R2
  source 1..46: mol_type = other DNA
ttattgaacatcctctggagggcgagaaaatgatcttcaaaagtgc

SEQ ID NO: 488 - DNA, 49 bp, synthetic construct
  misc_feature 1..49: note = EGFRmu30- R2
  source 1..49: mol_type = other DNA
ttattgaacatcctctggagggcgtaaaaatgatcttcaaaagtgccca

SEQ ID NO: 489 - DNA, 48 bp, synthetic construct
  misc_feature 1..48: note = EGFRmu31- R2
  source 1..48: mol_type = other DNA
ttattgaacatcctctggagggcgttaaaatgatcttcaaaagtgccc

SEQ ID NO: 490 - DNA, 44 bp, synthetic construct
  misc_feature 1..44: note = EGFRmu32- R2
  source 1..44: mol_type = other DNA
tgatcttcaaaagtgcccaactccgtgagcttgttactcgtccc

SEQ ID NO: 491 - DNA, 43 bp, synthetic construct
  misc_feature 1..43: note = EGFRmu33- R2
  source 1..43: mol_type = other DNA
tgatcttcaaaagtgcccaacgacgtgagcttgttactcgtgc

SEQ ID NO: 492 - DNA, 42 bp, synthetic construct
  misc_feature 1..42: note = EGFRmu34- R2
  source 1..42: mol_type = other DNA
gatcttcaaaagtgcccaacttcgtgagcttgttactcgtgc

SEQ ID NO: 493 - DNA, 43 bp, synthetic construct
  misc_feature 1..43: note = EGFRmu35- R2
  source 1..43: mol_type = other DNA
atgatcttcaaaagtgcccaagtacgtgagcttgttactcgtg

SEQ ID NO: 494 - DNA, 42 bp, synthetic construct
  misc_feature 1..42: note = EGFRmu36- R2
  source 1..42: mol_type = other DNA
cttcaaaagtgcccaactgcgagagcttgttactcgtgcctt

SEQ ID NO: 495 - DNA, 42 bp, synthetic construct
  misc_feature 1..42: note = EGFRmu37- R2
  source 1..42: mol_type = other DNA
cttcaaaagtgcccaactgcttgagcttgttactcgtgcctt

SEQ ID NO: 496 - DNA, 42 bp, synthetic construct
  misc_feature 1..42: note = EGFRmu38- R2
  source 1..42: mol_type = other DNA
cttcaaaactgcccaactgctcgagcttgttactcgtgcctt

SEQ ID NO: 497 - DNA, 42 bp, synthetic construct
  misc_feature 1..42: note = EGFRmu39- R2
  source 1..42: mol_type = other DNA
atcttcaaaagtgcccaactgatagagcttgttactcgtgcc

SEQ ID NO: 498 - DNA, 43 bp, synthetic construct
  misc_feature 1..43: note = EGFRmu40- R2
  source 1..43: mol_type = other DNA
actgcttgagcttgttactctggccttggcaaactttcttttc

SEQ ID NO: 499 - DNA, 41 bp, synthetic construct
  misc_feature 1..41: note = EGFRmu41- R2
  source 1..41: mol_type = other DNA
cgactgcaagagaaaactgacgatgttgcttggtcctgccg

SEQ ID NO: 500 - DNA, 42 bp, synthetic construct
  misc_feature 1..42: note = EGFRmu42- R2
  source 1..42: mol_type = other DNA
acgactgcaagagaaaactgattatgttgcttggtcctgccg

SEQ ID NO: 501 - DNA, 44 bp, synthetic construct
  misc_feature 1..44: note = EGFRmu43- R2
  source 1..44: mol_type = other DNA
gcatagcacaaatttttgtttcgtcaaattatcacatctccatc

SEQ ID NO: 502 - DNA, 47 bp, synthetic construct
  misc_feature 1..47: note = EGFRmu44- R2
  source 1..47: mol_type = other DNA
tttgcatagcacaaatttttgttatgtgaaattatcacatctccatc

SEQ ID NO: 503 - DNA, 44 bp, synthetic construct
  misc_feature 1..44: note = EGFRmu45- R2
  source 1..44: mol_type = other DNA
ttgaacatcctctggaggctttgaaaatgatcttcaaaagtgcc

SEQ ID NO: 504 - DNA, 39 bp, synthetic construct
  misc_feature 1..39: note = EGFRmu46- R2
  source 1..39: mol_type = other DNA
aaatgccaccggcaggatgcggagatcgccactgatgga

SEQ ID NO: 505 - DNA, 39 bp, synthetic construct; identical to SEQ ID NO: 504
  misc_feature 1..39: note = EGFRmu47- R2
  source 1..39: mol_type = other DNA

SEQ ID NO: 506 - DNA, 39 bp, synthetic construct
  misc_feature 1..39: note = EGFRmu48- R2
  source 1..39: mol_type = other DNA
tgtgaaggagtcacccctatgtgccaccggcaggatgtg

SEQ ID NO: 507 - DNA, 39 bp, synthetic construct
  misc_feature 1..39: note = EGFRmu49- R2
  source 1..39: mol_type = other DNA
gagtatgtgtgaaggagtcagccctaaatgccaccggca

SEQ ID NO: 508 - DNA, 40 bp, synthetic construct
  misc_feature 1..40: note = EGFRmu50- R2
  source 1..40: mol_type = other DNA
gagtatgtgtgaaggagtcattcctaaatgccaccggcag

SEQ ID NO: 509 - DNA, 41 bp, synthetic construct
  misc_feature 1..41: note = EGFRmu51- R2
  source 1..41: mol_type = other DNA
ccgtcctgttttcaggccattcctgaatcagcaaaaaccct

SEQ ID NO: 510 - DNA, 41 bp, synthetic construct; identical to SEQ ID NO: 509
  misc_feature 1..41: note = EGFRmu52- R2
  source 1..41: mol_type = other DNA

SEQ ID NO: 511 - DNA, 41 bp, synthetic construct
  misc_feature 1..41: note = EGFRmu53- R2
  source 1..41: mol_type = other DNA
gtccgtcctgttttcaggctcagcctgaatcagcaaaaacc

SEQ ID NO: 512 - DNA, 41 bp, synthetic construct
  misc_feature 1..41: note = EGFRmu54- R2
  source 1..41: mol_type = other DNA
gtaatcccaaggatgttatgtccaggctgacgactgcaaga

SEQ ID NO: 513 - DNA, 43 bp, synthetic construct
  misc_feature 1..43: note = EGFRmu55- R2
  source 1..43: mol_type = other DNA
ctgttttcacctctgttgcttttaattttggttttctgaccgg

SEQ ID NO: 514 - DNA, 43 bp, synthetic construct
  misc_feature 1..43: note = EGFRmu56- R2
  source 1..43: mol_type = other DNA
tctgttgcttataattttggtttcctgaccggaggtcccaaac

SEQ ID NO: 515 - DNA, 43 bp, synthetic construct
  misc_feature 1..43: note = EGFRmu57- R2
  source 1..43: mol_type = other DNA
tctgttgcttataattttggtttgctgaccggaggtcccaaac

SEQ ID NO: 516 - DNA, 46 bp, synthetic construct
  misc_feature 1..46: note = EGFRmu58- R2
  source 1..46: mol_type = other DNA
gcagctgttttcacctctgttttttataattttggttttctgaccg

SEQ ID NO: 517 - DNA, 42 bp, synthetic construct
  misc_feature 1..42: note = EGFRmu59- R2
  source 1..42: mol_type = other DNA
ccaaccaccacctcacacttttcgaacatcctctggaggctg

SEQ ID NO: 518 - DNA, 42 bp, synthetic construct
  misc_feature 1..42: note = EGFRmu60- R2
  source 1..42: mol_type = other DNA
ccacctcacagttattgaacagcctctggaggctgagaaaat

SEQ ID NO: 519 - DNA, 48 bp, synthetic construct
  misc_feature 1..48: note = EGFRmu61- R2
  source 1..48: mol_type = other DNA
ccaaggaccacctcacagttttcgtacagcctctggaggctgagaaaa

SEQ ID NO: 520 - DNA, 45 bp, synthetic construct
  misc_feature 1..45: note = EGFRmu62- R2
  source 1..45: mol_type = other DNA
gaggctgagaaaatgatcttcagcatcgcccaactgcgtgagctt

SEQ ID NO: 521 - DNA, 49 bp, synthetic construct
  misc_feature 1..49: note = EGFRmu63- R2
  source 1..49: mol_type = other DNA
tctggaggctgagaaaatgattttcagcatcgcccaactgcgtgagctt

SEQ ID NO: 522 - DNA, 42 bp, synthetic construct
  misc_feature 1..42: note = EGFRmu64- R2
  source 1..42: mol_type = other DNA
tgagcttgttactcgtgcctggccaaactttcttttcctcca

SEQ ID NO: 523 - DNA, 48 bp, synthetic construct
  misc_feature 1..48: note = EGFRmu65- R2
  source 1..48: mol_type = other DNA
tccaggttttccaaaggaattctcgaaaattcgttgagggcaatgagg

SEQ ID NO: 524 - DNA, 44 bp, synthetic construct
  misc_feature 1..44: note = EGFRmu66- R2
  source 1..44: mol_type = other DNA
gtacatatttcctctgatgatccgcaggttttccaaaggaattc

SEQ ID NO: 525 - DNA, 48 bp, synthetic construct
  misc_feature 1..48: note = EGFRmu67- R2
  source 1..48: mol_type = other DNA
aaggcataggaattttcgtagacctgatttcctctgatgatctgcagt

SEQ ID NO: 526 - DNA, 48 bp, synthetic construct
  misc_feature 1..48: note = EGFRmu68- R2
  source 1..48: mol_type = other DNA
cggttttatttgcatcatagtttaacatgactgctaaggcataggaat

SEQ ID NO: 527 - DNA, 48 bp, synthetic construct
  misc_feature 1..48: note = EGFRmu69- R2
  source 1..48: mol_type = other DNA
catgcaggatttcctgtaaatttgtcaggcgcagctccttcagtccgg

SEQ ID NO: 528 - DNA, 45 bp, synthetic construct
  misc_feature 1..45: note = EGFRmu70- R2
  source 1..45: mol_type = other DNA
cgttgcacagggcagggttcttttcgatccgcacggcgccatgca

SEQ ID NO: 529 - DNA, 44 bp, synthetic construct
  misc_feature 1..44: note = EGFRmu71- R2
  source 1..44: mol_type = other DNA
tgctctccacgttgcacagtttatcgttgttgctgaaccgcacg

SEQ ID NO: 530 - DNA, 40 bp, synthetic construct
  misc_feature 1..40: note = EGFRmu72- R2
  source 1..40: mol_type = other DNA
ccactggatgctctccacgtggcacagggcagggttgttg

SEQ ID NO: 531 - DNA, 47 bp, synthetic construct
  misc_feature 1..47: note = EGFRmu73- R2
  source 1..47: mol_type = other DNA
agatcataattcctctgcacaaggacaatttccaaattcccaaggac

SEQ ID NO: 532 - DNA, 55 bp, synthetic construct
  misc_feature 1..55: note = EGFRmu74- R2
  source 1..55: mol_type = other DNA
agaaggaaagatcataattcctccccgtaaggacaatttccaaattcccaaggac

SEQ ID NO: 533 - DNA, 44 bp, synthetic construct
  misc_feature 1..44: note = EGFRmu75- R2
  source 1..44: mol_type = other DNA
gttttccaaaggaattcgctcaaatgtgttgagggcaatgagga

SEQ ID NO: 534 - DNA, 49 bp, synthetic construct
  misc_feature 1..49: note = EGFRmu76- R2
  source 1..49: mol_type = other DNA
tgcaggttttccaaaggaattgactcaaatgtgttgagggcaatgagga

SEQ ID NO: 535 - DNA, 48 bp, synthetic construct
  misc_feature 1..48: note = EGFRmu77- R2
  source 1..48: mol_type = other DNA
tgcaggttttccaaaggaattgtcgaaaattcgttgagggcaatgagg

SEQ ID NO: 536 - DNA, 48 bp, synthetic construct
  misc_feature 1..48: note = EGFRmu78- R2
  source 1..48: mol_type = other DNA
cggttttatttgcatcatagttaaacatgactgctaaggcataggaat

SEQ ID NO: 537 - DNA, 57 bp, synthetic construct
  misc_feature 1..57: note = EGFRmu79- R2
  source 1..57: mol_type = other DNA
gttcagtccggttttatttgcattatagttaaacatgactgctaaggcataggaatt

SEQ ID NO: 538 - DNA, 37 bp, synthetic construct
  misc_feature 1..37: note = EGFRmu80- R2
  source 1..37: mol_type = other DNA
agggcagggttgttgctgatccgcacggcgccatgca

SEQ ID NO: 539 - DNA, 48 bp, synthetic construct
  misc_feature 1..48: note = EGFRmu81- R2
  source 1..48: mol_type = other DNA
ccacgttgcacagggcaggcttgttgctgatccgcacggcgccatgca

SEQ ID NO: 540 - DNA, 42 bp, synthetic construct
  misc_feature 1..42: note = EGFRmu82- R2
  source 1..42: mol_type = other DNA
ccaactgcgtgagcttgttaagcgtgccttggcaaactttct

SEQ ID NO: 541 - DNA, 43 bp, synthetic construct
  misc_feature 1..43: note = EGFRmu83- R2
  source 1..43: mol_type = other DNA
ccaactgcgagagcttgttaagcctgccttggcaaactttctt

SEQ ID NO: 542 - DNA, 52 bp, synthetic construct
  misc_feature 1..52: note = EGFRmu84- R2
  source 1..52: mol_type = other DNA
tcctctggaggctgagaaattgattttcagcatcgcccaactgcttgagctt

SEQ ID NO: 543 - DNA, 54 bp, synthetic construct
  misc_feature 1..54: note = EGFRmu85- R2
  source 1..54: mol_type = other DNA
catcctctggaggctgagatattgattttcagcatcgcccaactgcgtgagctt

SEQ ID NO: 544 - DNA, 48 bp, synthetic construct
  misc_feature 1..48: note = EGFRmu86- R2
  source 1..48: mol_type = other DNA
ggctgagaaaatgatcttcaaaaccgttcaactgcgtgagcttgttac

SEQ ID NO: 545 - DNA, 49 bp, synthetic construct
  misc_feature 1..49: note = EGFRmu87- R2
  source 1..49: mol_type = other DNA
aggctgagaaaatgatcttcataaccgttcaactgcgtgagcttgttac

SEQ ID NO: 546 - DNA, 50 bp, synthetic construct
  misc_feature 1..50: note = EGFRmu88- R2
  source 1..50: mol_type = other DNA
gaggctgagaaaatgatcttcataattgttcaactgcgtgagcttgttac

SEQ ID NO: 547 - DNA, 49 bp, synthetic construct
  misc_feature 1..49: note = EGFRmu89- R2
  source 1..49: mol_type = other DNA
gcagctgttttcacctctgtttttttgaattttggttttctgaccggag

SEQ ID NO: 548 - DNA, 43 bp, synthetic construct
  misc_feature 1..43: note = EGFRmu90- R2
  source 1..43: mol_type = other DNA
cgactgcaagagaaaactgacgaacttgcttggtcctgccgcg

SEQ ID NO: 549 - DNA, 42 bp, synthetic construct
  misc_feature 1..42: note = EGFRmu91- R2
  source 1..42: mol_type = other DNA
acatgttgctgagaaagtcacccctgactatgtcccgccact

SEQ ID NO: 550 - DNA, 55 bp, synthetic construct
  misc_feature 1..55: note = EGFRmu92- R2
  source 1..55: mol_type = other DNA
gtcgttctggaagtccatcacgatctcggcgtcacggtcactgctgactatgtcc

SEQ ID NO: 551 - DNA, 51 bp, synthetic construct
  misc_feature 1..51: note = EGFRmu93- R2
  source 1..51: mol_type = other DNA
gcagctgcccaggtggttgtcgcctttcaccgacatgttgctgagaaagtc

SEQ ID NO: 552 - DNA, 51 bp, synthetic construct
  misc_feature 1..51: note = EGFRmu94- R2
  source 1..51: mol_type = other DNA
tgagaaaatgatcttcaaaagtgtccaagtacgtgagcttgttactcgtgc

SEQ ID NO: 553 - DNA, 45 bp, synthetic construct
  misc_feature 1..45: note = EGFRmu95- R2
  source 1..45: mol_type = other DNA
gatcttcaaaagtgcccaactcatagagcttgttactcgtgcctt

SEQ ID NO: 554 - DNA, 51 bp, synthetic construct
  misc_feature 1..51: note = EGFRmu96- R2
  source 1..51: mol_type = other DNA
gactgctaaggcataggaattatcgtggtacatatttcctctgatgatctg

SEQ ID NO: 555 - DNA, 43 bp, synthetic construct
  misc_feature 1..43: note = EGFRmu01_F2
  source 1..43: mol_type = other DNA
cgcagttgggcacttttgaagaacattttctcagcctccagag

SEQ ID NO: 556 - DNA, 43 bp, synthetic construct
  misc_feature 1..43: note = EGFRmu02_F2
  source 1..43: mol_type = other DNA
cgcagttgggcacttttgaaaatcattttctcagcctccagag

SEQ ID NO: 557 - DNA, 43 bp, synthetic construct
  misc_feature 1..43: note = EGFRmu03_F2
  source 1..43: mol_type = other DNA
cgcagttgggcacttttgaacaacattttctcagcctccagag

SEQ ID NO: 558 - DNA, 45 bp, synthetic construct
  misc_feature 1..45: note = EGFRmu04_F2
  source 1..45: mol_type = other DNA
gtaacaagctcacgcagttgaacacttttgaagatcattttctca

SEQ ID NO: 559 - DNA, 55 bp, synthetic construct
  misc_feature 1..55: note = EGFRmu05_F2
  source 1..55: mol_type = other DNA
gtaacaacctcacgcagttgaacacttttgaagaacattttctcagcctccagag

SEQ ID NO: 560 - DNA, 44 bp, synthetic construct
  misc_feature 1..44: note = EGFRmu06_F2
  source 1..44: mol_type = other DNA
cgagtaacaagctcacgcaggtgggcacttttgaagatcatttt

SEQ ID NO: 561 - DNA, 44 bp, synthetic construct
  misc_feature 1..44: note = EGFRmu07_F2
  source 1..44: mol_type = other DNA
gagtaacaagctcacgcagattggcacttttgaagatcattttc

SEQ ID NO: 562 - DNA, 42 bp, synthetic construct
  misc_feature 1..42: note = EGFRmu08_F2
  source 1..42: mol_type = other DNA
ctggttatgtcctcattgccgtcaacacagtggagcgaattc

SEQ ID NO: 563 - DNA, 42 bp, synthetic construct
  misc_feature 1..42: note = EGFRmu09_F2
  source 1..42: mol_type = other DNA
ctggttatgtcctcattgccatcaacacagtggagcgaattc

SEQ ID NO: 564 - DNA, 44 bp, synthetic construct
  misc_feature 1..44: note = EGFRmu10_F2
  source 1..44: mol_type = other DNA
tgggaatttggaaattacctgggtgcagaggaattatgatcttt

SEQ ID NO: 565 - DNA, 46 bp, synthetic construct
  misc_feature 1..46: note = EGFRmu11_F2
  source 1..46: mol_type = other DNA
atcatcagaggaaatatgtactgggaaaattcctatgccttagcag

SEQ ID NO: 566 - DNA, 44 bp, synthetic construct
  misc_feature 1..44: note = EGFRmu12_F2
  source 1..44: mol_type = other DNA
tcagaggaaatatgtactacgataattcctatgccttagcagtc

SEQ ID NO: 567 - DNA, 45 bp, synthetic construct
  misc_feature 1..45: note = EGFRmu13_F2
  source 1..45: mol_type = other DNA
catcagaggaaatatgtactaccaaaattcctatgccttagcagt

SEQ ID NO: 568 - DNA, 45 bp, synthetic construct
  misc_feature 1..45: note = EGFRmu14_F2
  source 1..45: mol_type = other DNA
tcctatgccttagcagtcttagctaactatgatgcaaataaaacc

SEQ ID NO: 569 - DNA, 45 bp, synthetic construct
  misc_feature 1..45: note = EGFRmu15_F2
  source 1..45: mol_type = other DNA
tcctatgccttagcagtcttaactaactatgatgcaaataaaacc

SEQ ID NO: 570 - DNA, 43 bp, synthetic construct
  misc_feature 1..43: note = EGFRmu16_F2
  source 1..43: mol_type = other DNA
aagctcacgcagttgggcaaatttgaagatcattttcttagcc

SEQ ID NO: 571 - DNA, 43 bp, synthetic construct
  misc_feature 1..43: note = EGFRmu17_F2
  source 1..43: mol_type = other DNA
aagctcacgcagttgggccaatttgaagatcattttctcagcc

SEQ ID NO: 572 - DNA, 42 bp, synthetic construct
  misc_feature 1..42: note = EGFRmu18_F2
  source 1..42: mol_type = other DNA
agctcacgcacttgggcatttttgaagatcattttctcagcc

SEQ ID NO: 573 - DNA, 43 bp, synthetic construct
  misc_feature 1..43: note = EGFRmu19_F2
  source 1..43: mol_type = other DNA
aagctcacgcagttgggcgattttgaagatcattttctcagcc

SEQ ID NO: 574 - DNA, 43 bp, synthetic construct
  misc_feature 1..43: note = EGFRmu20_F2
  source 1..43: mol_type = other DNA
aagctcacgcagttgggctattttgaagatcattttctcagcc

SEQ ID NO: 575 - DNA, 43 bp, synthetic construct
  misc_feature 1..43: note = EGFRmu21_F2
  source 1..43: mol_type = other DNA
aagctcacgcagttgggcggttttgaagatcattttctcagcc

SEQ ID NO: 576 - DNA, 43 bp, synthetic construct
  misc_feature 1..43: note = EGFRmu22_F2
  source 1..43: mol_type = other DNA
aagctcacgcagttgggcctttttgaagatcattttctcagcc

SEQ ID NO: 577 - DNA, 44 bp, synthetic construct
  misc_feature 1..44: note = EGFRmu23_F2
  source 1..44: mol_type = other DNA
tgggcacttttgaagatcattttgccagcctccagaggatgttc

SEQ ID NO: 578 - DNA, 45 bp, synthetic construct
  misc_feature 1..45: note = EGFRmu24_F2
  source 1..45: mol_type = other DNA
tggcacttttgaagatcatttttggagcctccagaggatgttcaa

SEQ ID NO: 579 - DNA, 45 bp, synthetic construct
  misc_feature 1..45: note = EGFRmu25_F2
  source 1..45: mol_type = other DNA
cacttttgaagatcattttctcaccctccagaggatgttcaataa

SEQ ID NO: 580 - DNA, 45 bp, synthetic construct
  misc_feature 1..45: note = EGFRmu26_F2
  source 1..45: mol_type = other DNA
gcacttttgaagatcattttctcctcctccagaggatgttcaata

SEQ ID NO: 581 - DNA, 49 bp, synthetic construct
  misc_feature 1..49: note = EGFRmu27_F2
  source 1..49: mol_type = other DNA
gggcacttttgaagatcattttgccctcctccagaggatgttcaataac

SEQ ID NO: 582 - DNA, 49 bp, synthetic construct
  misc_feature 1..49: note = EGFRmu28_F2
  source 1..49: mol_type = other DNA
gggcacttttgaagatcattttgcccaactccagaggatgttcaataac

SEQ ID NO: 583 - DNA, 46 bp, synthetic construct
  misc_feature 1..46: note = EGFRmu29_F2
  source 1..46: mol_type = other DNA
gcactttgaaagatcattttctcgccctccagaggatgttcaataa

SEQ ID NO: 584 - DNA, 49 bp, synthetic construct
  misc_feature 1..49: note = EGFRmu30_F2
  source 1..49: mol_type = other DNA
tgggcacttttgaagatcatttttacgccctccagaggatgttcaataa

SEQ ID NO: 585 - DNA, 48 bp, synthetic construct
  misc_feature 1..48: note = EGFRmu31_F2
  source 1..48: mol_type = other DNA
gggcacttttgaagatcattttaacgccctccagaggatgttcaataa

SEQ ID NO: 586 - DNA, 44 bp, synthetic construct
  misc_feature 1..44: note = EGFRmu32_F2
  source 1..44: mol_type = other DNA
ggcacgagtaacaagctcacggagttgggcacttttcaagatca

SEQ ID NO: 587 - DNA, 43 bp, synthetic construct
  misc_feature 1..43: note = EGFRmu33_F2
  source 1..43: mol_type = other DNA
gcacgagtaacaagctcacgtcgttgggcacttttgaagatca

SEQ ID NO: 588 - DNA, 42 bp, synthetic construct
  misc_feature 1..42: note = EGFRmu34_F2
  source 1..42: mol_type = other DNA
gcacgagtaacaagctcacgaagttgggcacttttgaagatc

SEQ ID NO: 589 - DNA, 43 bp, synthetic construct
  misc_feature 1..43: note = EGFRmu35_F2
  source 1..43: mol_type = other DNA
cacgagtaacaagctcacgtacttgggcacttttgaagatcat

SEQ ID NO: 590 - DNA, 42 bp, synthetic construct
  misc_feature 1..42: note = EGFRmu36_F2
  source 1..42: mol_type = other DNA
aaggcacgagtaacaagctctcgcagttgggcacttttgaag

SEQ ID NO: 591 - DNA, 42 bp, synthetic construct
  misc_feature 1..42: note = EGFRmu37_F2
  source 1..42: mol_type = other DNA
aaggcacgagtaacaagctcaagcagttgggcacttttgaag

SEQ ID NO: 592 - DNA, 42 bp, synthetic construct
  misc_feature 1..42: note = EGFRmu38_F2
  source 1..42: mol_type = other DNA
aaggcacgagtaacaagctcgagcagttgggcacttttgaag

SEQ ID NO: 593 - DNA, 42 bp, synthetic construct
  misc_feature 1..42: note = EGFRmu39_F2
  source 1..42: mol_type = other DNA
ggcacgagtaacaagctctatcagttgggcacttttgaagat

SEQ ID NO: 594 - DNA, 43 bp, synthetic construct
  misc_feature 1..43: note = EGFRmu40_F2
  source 1..43: mol_type = other DNA
gaaaagaaagtttgccaaggccagagtaacaagctcacgcagt

SEQ ID NO: 595 - DNA, 41 bp, synthetic construct
  misc_feature 1..41: note = EGFRmu41_F2
  source 1..41: mol_type = other DNA
cggcagcaccaagcaacatcgtcagttttctcttgcagtcg

SEQ ID NO: 596 - DNA, 42 bp, synthetic construct
  misc_feature 1..42: note = EGFRmu42_F2
  source 1..42: mol_type = other DNA
cggcaggaccaagcaacataatcagttttctcttgcactcgt

SEQ ID NO: 597 - DNA, 44 bp, synthetic construct
  misc_feature 1..44: note = EGFRmu43_F2
  source 1..44: mol_type = other DNA
gatggagatgtgataatttcacgaaacaaaaatttgtgctatgc

SEQ ID NO: 598 - DNA, 47 bp, synthetic construct
  misc_feature 1..47: note = EGFRmu44_F2
  source 1..47: mol_type = other DNA
gatggagatgtgataatttcacataacaaaaatttttgctatgcaaa

SEQ ID NO: 599 - DNA, 44 bp, synthetic construct
  misc_feature 1..44: note = EGFRmu45_F2
  source 1..44: mol_type = other DNA
ggcacttttgaagatcattttcaaagcctccagaggatgttcaa

SEQ ID NO: 600 - DNA, 39 bp, synthetic construct
  misc_feature 1..39: note = EGFRmu46_F2
  source 1..39: mol_type = other DNA
tccatcagtggcgatctccgcatcctgccggtggcattt

SEQ ID NO: 601 - DNA, 38 bp, synthetic construct
  misc_feature 1..38: note = EGFRmu47_F2
  source 1..38: mol_type = other DNA
cgatctccacatcctgccgctggcatttaggggtgact

SEQ ID NO: 602 - DNA, 39 bp, synthetic construct
  misc_feature 1..39: note = EGFRmu48_F2
  source 1..39: mol_type = other DNA
cacatcctgccggtggcacataggggtgactccttcaca

SEQ ID NO: 603 - DNA, 39 bp, synthetic construct
  misc_feature 1..39: note = EGFRmu49_F2
  source 1..39: mol_type = other DNA
tgccggtggcatttagggctgactccttcacacatactc

SEQ ID NO: 604 - DNA, 40 bp, synthetic construct
  misc_feature 1..40: note = EGFRmu50_F2
  source 1..40: mol_type = other DNA
ctgccggtggcatttaggaatgactccttcacacatactc

SEQ ID NO: 605 - DNA, 41 bp, synthetic construct
  misc_feature 1..41: note = EGFRmu51_F2
  source 1..41: mol_type = other DNA
agggtttttgctgattcaggaatggcctgaaaacaggacgg

SEQ ID NO: 606 - DNA, 41 bp, synthetic construct
  misc_feature 1..41: note = EGFRmu52_F2
  source 1..41: mol_type = other DNA
agggtttttgctgattcaggattggcctgaaaacaggacgg

SEQ ID NO: 607 - DNA, 41 bp, synthetic construct
  misc_feature 1..41: note = EGFRmu53_F2
  source 1..41: mol_type = other DNA
ggtttttgctgattcaggctgagcctgaaaacaggacggac

SEQ ID NO: 608 - DNA, 41 bp, synthetic construct
  misc_feature 1..41: note = EGFRmu54_F2
  source 1..41: mol_type = other DNA
tcttgcagtcgtcagcctggacataacatccttgggattac

SEQ ID NO: 609 - DNA, 43 bp, synthetic construct
  misc_feature 1..43: note = EGFRmu55_F2
  source 1..43: mol_type = other DNA
ccggtcagaaaaccaaaattaaaagcaacagaggtgaaaacag

SEQ ID NO: 610 - DNA, 43 bp, synthetic construct
  misc_feature 1..43: note = EGFRmu56_F2
  source 1..43: mol_type = other DNA
gtttgggacctccggtcaggaaaccaaaattataagcaacaga

SEQ ID NO: 611 - DNA, 43 bp, synthetic construct
  misc_feature 1..43: note = EGFRmu57_F2
  source 1..43: mol_type = other DNA
gtttgggacctccggtcagcaaaccaaaattataagcaacaga

SEQ ID NO: 612 - DNA, 46 bp, synthetic construct
  misc_feature 1..46: note = EGFRmu58_F2
  source 1..46: mol_type = other DNA
cggtcagaaaaccaaaattataaaaaacagaggtgaaaacagctgc

SEQ ID NO: 613 - DNA, 42 bp, synthetic construct
  misc_feature 1..42: note = EGFRmu59_F2
  source 1..42: mol_type = other DNA
cagcctccagaggatgttcgaaaactgtgaggtggtccttgg

SEQ ID NO: 614 - DNA, 42 bp, synthetic construct
  misc_feature 1..42: note = EGFRmu60_F2
  source 1..42: mol_type = other DNA
attttctcagcctccagaggctgttcaataactgtgaggtgg

SEQ ID NO: 615 - DNA, 48 bp, synthetic construct
  misc_feature 1..48: note = EGFRmu61_F2
  source 1..48: mol_type = other DNA
ttttctcagcctccagaggctgtacgaaaactgtgaggtggtccttgg

SEQ ID NO: 616 - DNA, 45 bp, synthetic construct
  misc_feature 1..45: note = EGFRmu62_F2
  source 1..45: mol_type = other DNA
aagctcacgcagttgggcgatgctgaagatcattttctcagcctc

SEQ ID NO: 617 - DNA, 49 bp, synthetic construct
  misc_feature 1..49: note = EGFRmu63_F2
  source 1..49: mol_type = other DNA
aagctcacgcagttgggcgatgctgaaaatcattttctcaccctccaga

SEQ ID NO: 618 - DNA, 42 bp, synthetic construct
  misc_feature 1..42: note = EGFRmu64_F2
  source 1..42: mol_type = other DNA
tggaggaaaagaaagtttgcccaggcacgagtaacaagctca

SEQ ID NO: 619 - DNA, 51 bp, synthetic construct
  misc_feature 1..51: note = EGFRmu65_F2
  source 1..51: mol_type = other DNA
tgtcctcattgccctcaacgaattttcgacaattcctttggaaaacctgca

SEQ ID NO: 620 - DNA, 44 bp, synthetic construct
  misc_feature 1..44: note = EGFRmu66_F2
  source 1..44: mol_type = other DNA
gaattcctttggaaaacctgcggatcatcagaggaaatatgtac

SEQ ID NO: 621 - DNA, 46 bp, synthetic construct
  misc_feature 1..46: note = EGFRmu67_F2
  source 1..46: mol_type = other DNA
cctgcagatcatcagaggaactcaggtcacgaaaattccatgcctt

SEQ ID NO: 622 - DNA, 48 bp, synthetic construct
  misc_feature 1..48: note = EGFRmu68_F2
  source 1..48: mol_type = other DNA
attcctatgccttagcagtcatgttaaactatgatgcaaataaaacgg

SEQ ID NO: 623 - DNA, 48 bp, synthetic construct
  misc_feature 1..48: note = EGFRmu69_F2
  source 1..48: mol_type = other DNA
ccggactgaaggagctgcgcctgacaaatttacaggaaatcctgcatg

SEQ ID NO: 624 - DNA, 45 bp, synthetic construct
  misc_feature 1..45: note = EGFRmu70_F2
  source 1..45: mol_type = other DNA
tgcatggcgccgtccccatcgaaaagaaccctgccctgtgcaacg

SEQ ID NO: 625 - DNA, 44 bp, synthetic construct
  misc_feature 1..44: note = EGFRmu71_F2
  source 1..44: mol_type = other DNA
cgtgcggttcagcaacaacgataaactgtgcaacgtggagagca

SEQ ID NO: 626 - DNA, 40 bp, synthetic construct
  misc_feature 1..40: note = EGFRmu72_F2
  source 1..40: mol_type = other DNA
caacaaccctcccctgtgccacgtggagagcatccagtgg

SEQ ID NO: 627 - DNA, 47 bp, synthetic construct
  misc_feature 1..47: note = EGFRmu73_F2
  source 1..47: mol_type = other DNA
gtccttgggaatttggaaattgtccttgtgcagaggaattatgatct

SEQ ID NO: 628 - DNA, 55 bp, synthetic construct
  misc_feature 1..55: note = EGFRmu74_F2
  source 1..55: mol_type = other DNA
gtccttgggaatttggaaattgtccttacggggaggaattatgatctttccttct

SEQ ID NO: 629 - DNA, 44 bp, synthetic construct
  misc_feature 1..44: note = EGFRmu75_F2
  source 1..44: mol_type = other DNA
tcctcattgccctcaacacatttgagcgaattcctttggaaaac

SEQ ID NO: 630 - DNA, 49 bp, synthetic construct
  misc_feature 1..49: note = EGFRmu76_F2
  source 1..49: mol_type = other DNA
tcctcattgccctcaacacatttcagtcaattcctttggaaaacctgca

SEQ ID NO: 631 - DNA, 51 bp, synthetic construct
  misc_feature 1..51: note = EGFRmu77_F2
  source 1..51: mol_type = other DNA
tgtcttcattgccctcaacgaattttcgacaattcctttggaaaacctgca

SEQ ID NO: 632 - DNA, 48 bp, synthetic construct
  misc_feature 1..48: note = EGFRmu78_F2
  source 1..48: mol_type = other DNA
attcctatgccttagcagtcatgtttaactatgatgcaaataaaaccg

SEQ ID NO: 633 - DNA, 57 bp, synthetic construct
  misc_feature 1..57: note = EGFRmu79_F2
  source 1..57: mol_type = other DNA
aattcctatgccttagcagtcatgtttaactataatgcaaataaaaccggactgaag

SEQ ID NO: 634 - DNA, 37 bp, synthetic construct
  misc_feature 1..37: note = EGFRmu80_F2
  source 1..37: mol_type = other DNA
tgcatgcccccgtgcggatcaccaacaaccctgccct

SEQ ID NO: 635 - DNA, 48 bp, synthetic construct
  misc_feature 1..48: note = EGFRmu81_F2
  source 1..48: mol_type = other DNA
tgcatggcgccgtgcggatcagcaacaagcctgccctgtgcaacgtgg

SEQ ID NO: 636 - DNA, 42 bp, synthetic construct
  misc_feature 1..42: note = EGFRmu82_F2
  source 1..42: mol_type = other DNA
agaaagtttgccaaggcacgcttaacaagctcacgcagttgg

SEQ ID NO: 637 - DNA, 43 bp, synthetic construct
  misc_feature 1..43: note = EGFRmu83_F2
  source 1..43: mol_type = other DNA
aagaaagtttgccaaggcacgcttaacaagctctcgcacttgg

SEQ ID NO: 638 - DNA, 52 bp, synthetic construct
  misc_feature 1..52: note = EGFRmu84_F2
  source 1..52: mol_type = other DNA
aagctcacgcagttgggcgatgctgaaaatcaatttctcagcgtccagagga

SEQ ID NO: 639 - DNA, 54 bp, synthetic construct
  misc_feature 1..54: note = EGFRmu85_F2
  source 1..54: mol_type = other DNA
aagctcacgcagttgggcgatgctgaaaatcaatatctcagcctccagaggatg

SEQ ID NO: 640 - DNA, 48 bp, synthetic construct
  misc_feature 1..48: note = EGFRmu86_F2
  source 1..48: mol_type = other DNA
gtaacaagctcacgcagttgaacggttatgaagatcattttctcagcc

SEQ ID NO: 641 - DNA, 49 bp, synthetic construct
  misc_feature 1..49: note = EGFRmu87_F2
  source 1..49: mol_type = other DNA
gtaacaagctcacgcagttgaacggttatgaagatcattttctcagcct

SEQ ID NO: 642 - DNA, 50 bp, synthetic construct
  misc_feature 1..50: note = EGFRmu88_F2
  source 1..50: mol_type = other DNA
gtaacaagctcacgcagttgaacaattatgaagatcattttctcagcctc

SEQ ID NO: 643 - DNA, 49 bp, synthetic construct
  misc_feature 1..49: note = EGFRmu89_F2
  source 1..49: mol_type = other DNA
ctccggtcagaaaaccaaaattcaaaaaaacagaggtgaaaacagctgc

SEQ ID NO: 644 - DNA, 43 bp, synthetic construct
  misc_feature 1..43: note = EGFRmu90_F2
  source 1..43: mol_type = other DNA
cgcggcaggaccaagcaagttcgtcagttttctcctgcagtcg

SEQ ID NO: 645 - DNA, 42 bp, synthetic construct
  misc_feature 1..42: note = EGFRmu91_F2
  source 1..42: mol_type = other DNA
agtggcgggacatagtcaggggtgactttctcagcaacatgt

SEQ ID NO: 646 - DNA, 55 bp, synthetic construct
  misc_feature 1..55: note = EGFRmu92_F2
  source 1..55: mol_type = other DNA
ggacatagtcagcagtgaccgtgacgccgagatcgtgatggacttccagaaccac

SEQ ID NO: 647 - DNA, 51 bp, synthetic construct
  misc_feature 1..51: note = EGFRmu93_F2
  source 1..51: mol_type = other DNA
gactttctcagcaacatgtcggtgaaaggcgacaaccacctgggcagctgc

SEQ ID NO: 648 - DNA, 51 bp, synthetic construct
  misc_feature 1..51: note = EGFRmu94_F2
  source 1..51: mol_type = other DNA
gcacgagtaacaacctcacgtacttggacaactttgaagatcattttctca

SEQ ID NO: 649 - DNA, 45 bp, synthetic construct
  misc_feature 1..45: note = EGFRmu95_F2
  source 1..45: mol_type = other DNA
aaggcacgagtaacaagctctatgagttgggcacttttgaagatc

SEQ ID NO: 650 - DNA, 51 bp, synthetic construct
  misc_feature 1..51: note = EGFRmu96_F2
  source 1..51: mol_type = other DNA
cagatcatcagaggaaatatgtaccacgataatatgtatgccttagcagtc

SEQ ID NO: 651 - protein, 19 aa, Mus musculus
  REGION 1..19: note = Mouse Ig heavy chain V region 102 Signal Sequence
MGWSCIILFLVATATGVHS

SEQ ID NO: 652 - protein, 867 aa, synthetic construct
  REGION 1..867: note = EN2642 Wildtype Chain 1
  SIGNAL 1..19: note = Mouse Ig heavy chain V region 102 Signal Sequence
  DOMAIN 641..645: note = N-terminal Fc
MGWSCIILFLVATATGVHSLEEKKVCQGTSNKLSQLGTFEDHFLSLQRMFNNCEVVLGNLEITYVQRNYDLSFLKTIQEVAGYVLIALNTVERIPLENLQIIRGNMYYENSYALAVLSNYDANKTGLKELPMRNLQEILHGAVRFSNNPALCNVESIQWRDIVSSDFLSNMSMDFQNHLGSCQKCDPSCPNGSCWGAGEENCQKLTKIICAQQCSGRCRGKSPSDCCHNQCAAGCTGPRESDCLVCRKFRDEATCKDTCPPLMLYNPTTYQMDVNPEGKYSFGATCVKKCPRNYVVTDHGSCVRACGADSYEMEEDGVRKCKKCEGPCRKVCNGIGIGEFKDSLSINATNIKHFKNCTSISGDLHILPVAFRGDSFTHTPPLDPQELDILKTVKEITGFLLIQAWPENRTDLHAFENLEIIRGRTKQHGQFSLAVVSLNITSLGLRSLKEISDGDVIISGNKNLCYANTINWKKLFGTSGQKTKIISNRGENSCKATGQVCHALCSPEGCWGPEPRDCVSCRNVSRGRECVDKCKLLEGEPREFVENSECIQCHPECLPQAMNITCTGRGPDNCIQCAHYIDSPHCVKTCPAGVMGENNTLVWKYADAGHVCHLCHPNCTYGCTGPGLEGCPTNGPKIPSDKTHTCPPCPAPELLGGPSVFLFPPKPKDTLMISRTPEVTCVVVDVSHEDPEVKFNWYVDGVEVHNAKTKPREEQYNSTYRVVSVLTVLHQDWLNGKEYKCKVSNKALPAPIEKTISKAKGQPREPQVYTLPPSRDELTKNQVSLTCLVKGFYPSDIAVEWESNGQPENNYKTTPPVLDSDGSFFLYSKLTVDKSRWQQGNVFSCSVMHEALHNHYTQKSLSLSPGK

SEQ ID NO: 653 - protein, 848 aa, synthetic construct
  REGION 1..848: note = EN2642 Wildtype Chain 1 without Signal Sequence
  DOMAIN 622..626: note = N-terminal Fc
LEEKKVCQGTSNKLSQLGTFEDHFLSLQRMFNNCEVVLGNLEITYVQRNYDLSFLKTIQEVAGYVLIALNTVERIPLENLQIIRGNMYYENSYALAVLSNYDANKTGLKELPMRNLQEILHGAVRFSNNPALCNVESIQWRDIVSSDFLSNMSMDFQNHLGSCQKCDPSCPNGSCWGAGEENCQKLTKIICAQQCSGRCRGKSPSDCCHNQCAAGCTGPRESDCLVCRKFRDEATCKDTCPPLMLYNPTTYQMDVNPEGKYSFGATCVKKCPRNYVVTDHGSCVRACGADSYEMEEDGVRKCKKCEGPCRKVCNGIGIGEFKDSLSINATNIKHFKNCTSISGDLHILPVAFRGDSFTHTPPLDPQELDILKTVKEITGFLLIQAWPENRTDLHAFENLEIIRGRTKQHGQFSLAVVSLNITSLGLRSLKEISDGDVIISGNKNLCYANTINWKKLFGTSGQKTKIISNRGENSCKATGQVCHALCSPEGCWGPEPRDCVSCRNVSRGRECVDKCKLLEGEPREFVENSECIQCHPECLPQAMNITCTGRGPDNCIQCAHYIDSPHCVKTCPAGVMGENNTLVWKYADAGHVCHLCHPNCTYGCTGPGLEGCPTNGPKIPSDKTHTCPPCPAPELLGGPSVFLFPPKPKDTLMISRTPEVTCVVVDVSHEDPEVKFNWYVDGVEVHNAKTKPREEQYNSTYRVVSVLTVLHQDWLNGKEYKCKVSNKALPAPIEKTISKAKGQPREPQVYTLPPSRDELTKNQVSLTCLVKGFYPSDIAVEWESNGQPENNYKTTPPVLDSDGSFFLYSKLTVDKSRWQQGNVFSCSVMHEALHNHYTQKSLSLSPGK

SEQ ID NO: 654 - protein, 870 aa, synthetic construct
  REGION 1..870: note = EN2642 Wildtype Chain 2
  SIGNAL 1..19: note = Mouse Ig heavy chain V region 102 Signal Sequence
  DOMAIN 644..648: note = N-terminal Fc
MGWSCIILFLVATATGVHSSEVGNSQAVCPGTLNGLSVTGDAENQYQTLYKLYERCEVVMGNLEIVLTGHNADLSFLQWIREVTGYVLVAMNEFSTLPLPNLRVVRGTQVYDGKFAIFVMLNYNTNSSHALRQLRLTQLTEILSGGVYIEKNDKLCHMDTIDWRDIVRDRDAEIVVKDNGRSCPPCHEVCKGRCWGPGSEDCQTLTKTICAPQCNGHCFGPNPNQCCHDECAGGCSGPQDTDCFACRHFNDSGACVPRCPQPLVANKLTFQLEPNPHTKYQYGGVCVASCPHNFVVDQTSCVRACPPDKMEVDKNGLKMCEPCGGLCPKACEGTGSGSRFQTVDSSNIDGFVNCTKILGNLDFLITGLNGDPWHKIPALDPEKLNVFRTVREITGYLNIQSWPPHMHNFSVFSNLTTIGGRSLYNRGFSLLIMKNLNVTSLGFRSLKEISAGRIYISANRQLCYHHSLNWTKVLRGPTEERLDIKHNRPRRDCVAEGKVCDPLCSSGGCWGPGPGQCLSCRNYSRGGVCVTHCNFLNGEPREFAHEAECFSCHPECQPMEGTATCNGSGSDTCAQCAHFRDGPHCVSSCPHGVLGAKGPIYKYPDVQNECRPCHENCTQGCKGPELQDCLGQTLVLIGKTHLTDKTHTCPPCPAPELLGGPSVFLFPPKPKDTLMISRTPEVTCVVVDVSHEDPEVKFNWYVDGVEVHNAKTKPREEQYNSTYRVVSVLTVLHQDWLNGKEYKCKVSNKALPAPIEKTISKAKGQPREPQVYTLPPSRDELTKNQVSLTCLVKGFYPSDIAVEWESNGQPENNYKTTPPVLDSDGSFFLYSKLTVDKSRWQQGNVFSCSVMHEALHNHYTQKSLSLSPGK

SEQ ID NO: 655 - protein, 851 aa, synthetic construct
  REGION 1..851: note = EN2642 Wildtype Chain 2 without the signal sequence
  DOMAIN 625..629: note = N-terminal Fc
SEVGNSQAVCPGTLNGLSVTGDAENQYQTLYKLYERCEVVMGNLEIVLTGHNADLSFLQWIREVTGYVLVAMNEFSTLPLPNLRVVRGTQVYDGKFAIFVMLNYNTNSSHALRQLRLTQLTEILSGGVYIEKNDKLCHMDTIDWRDIVRDRDAEIVVKDNGRSCPPCHEVCKGRCWGPGSEDCQTLTKTICAPQCNGHCFGPNPNQCCHDECAGGCSGPQDTDCFACRHFNDSGACVPRCPQPLVANKLTFQLEPNPHTKYQYGGVCVASCPHNFVVDQTSCVRACPPDKMEVDKNGLKMCEPCGGLCPKACEGTGSGSRFQTVDSSNIDGFVNCTKILGNLDFLITGLNGDPWHKIPALDPEKLNVFRTVREITGYLNIQSWPPHMHNFSVFSNLTTIGGRSLYNRGFSLLIMKNLNVTSLGFRSLKEISAGRIYISANRQLCYHHSLNWTKVLRGPTEERLDIKHNRPRRDCVAEGKVCDPLCSSGGCWGPGPGQCLSCRNYSRGGVCVTHCNFLNGEPREFAHEAECFSCHPECQPMEGTATCNGSGSDTCAQCAHFRDGPHCVSSCPHGVLGAKGPIYKYPDVQNECRPCHENCTQGCKGPELQDCLGQTLVLIGKTHLTDKTHTCPPCPAPELLGGPSVFLFPPKPKDTLMISRTPEVTCVVVDVSHEDPEVKFNWYVDGVEVHNAKTKPREEQYNSTYRVVSVLTVLHQDWLNGKEYKCKVSNKALPAPIEKTISKAKGQPREPQVYTLPPSRDELTKNQVSLTCLVKGFYPSDIAVEWESNGQPENNYKTTPPVLDSDGSFFLYSKLTVDKSRWQQGNVFSCSVMHEALHNHYTQKSLSLSPGK

SEQ ID NO: 656 - protein, 866 aa, synthetic construct
  REGION 1..866: note = EN2642-LS (M848L,N854S) Chain 1
  DOMAIN 641..645: note = N-terminal Fc
  VARIANT 848: note = Mutation to improve half-life
  VARIANT 854: note = Mutation to improve half-life
  SIGNAL 1..19: note = Mouse Ig heavy chain V region 102 Signal Sequence
MGWSCIILFLVATATGVHSLEEKKVCQGTSNKLSQLGTFEDHFLSLQRMFNNCEVVLGNLEITYVQRNYDLSFLKTIQEVAGYVLIALNTVERIPLENLQIIRGNMYYENSYALAVLSNYDANKTGLKELPMRNLQEILHGAVRFSNNPALCNVESIQWRDIVSSDFLSNMSMDFQNHLGSCQKCDPSCPNGSCWGAGEENCQKLTKIICAQQCSGRCRGKSPSDCCHNQCAAGCTGPRESDCLVCRKFRDEATCKDTCPPLMLYNPTTYQMDVNPEGKYSFGATCVKKCPRNYVVTDHGSCVRACGADSYEMEEDGVRKCKKCEGPCRKVCNGIGIGEFKDSLSINATNIKHFKNCTSISGDLHILPVAFRGDSFTHTPPLDPQELDILKTVKEITGFLLIQAWPENRTDLHAFENLEIIRGRTKQHGQFSLAVVSLNITSLGLRSLKEISDGDVIISGNKNLCYANTINWKKLFGTSGQKTKIISNRGENSCKATGQVCHALCSPEGCWGPEPRDCVSCRNVSRGRECVDKCKLLEGEPREFVENSECIQCHPECLPQAMNITCTGRGPDNCIQCAHYIDSPHCVKTCPAGVMGENNTLVWKYADAGHVCHLCHPNCTYGCTGPGLEGCPTNGPKIPSDKTHTCPPCPAPELLGGPSVFLFPPKPKDTLMISRTPEVTCVVVDVSHEDPEVKFNWYVDGVEVHNAKTKPREEQYNSTYRVVSVLTVLHQDWLNGKEYKCKVSNKALPAPIEKTISKAKGQPREPQVYTLPPSREEMTKNQVSLTCLVKGFYPSDIAVEWESNGQPENNYKTTPPVLDSDGSFFLYSKLTVDKSRWQQGNVFSCSVLHEALHSHYTQKSLSLSPG

SEQ ID NO: 657 - protein, 847 aa, synthetic construct
  REGION 1..847: note = EN2642-LS (M829L,N835S) Chain 1 without signal sequence
  DOMAIN 622..626: note = N-terminal Fc
  VARIANT 829: note = Mutation to improve half-life
  VARIANT 835: note = Mutation to improve half-life
LEEKKVCQGTSNKLSQLGTFEDHFLSLQRMFNNCEVVLGNLEITYVQRNYDLSFLKTIQEVAGYVLIALNTVERIPLENLQIIRGNMYYENSYALAVLSNYDANKTGLKELPMRNLQEILHGAVRFSNNPALCNVESIQWRDIVSSDFLSNMSMDFQNHLGSCQKCDPSCPNGSCWGAGEENCQKLTKIICAQQCSGRCRGKSPSDCCHNQCAAGCTGPRESDCLVCRKFRDEATCKDTCPPLMLYNPTTYQMDVNPEGKYSFGATCVKKCPRNYVVTDHGSCVRACGADSYEMEEDGVRKCKKCEGPCRKVCNGIGIGEFKDSLSINATNIKHFKNCTSISGDLHILPVAFRGDSFTHTPPLDPQELDILKTVKEITGFLLIQAWPENRTDLHAFENLEIIRGRTKQHGQFSLAVVSLNITSLGLRSLKEISDGDVIISGNKNLCYANTINWKKLFGTSGQKTKIISNRGENSCKATGQVCHALCSPEGCWGPEPRDCVSCRNVSRGRECVDKCKLLEGEPREFVENSECIQCHPECLPQAMNITCTGRGPDNCIQCAHYIDSPHCVKTCPAGVMGENNTLVWKYADAGHVCHLCHPNCTYGCTGPGLEGCPTNGPKIPSDKTHTCPPCPAPELLGGPSVFLFPPKPKDTLMISRTPEVTCVVVDVSHEDPEVKFNWYVDGVEVHNAKTKPREEQYNSTYRVVSVLTVLHQDWLNGKEYKCKVSNKALPAPIEKTISKAKGQPREPQVYTLPPSREEMTKNQVSLTCLVKGFYPSDIAVEWESNGQPENNYKTTPPVLDSDGSFFLYSKLTVDKSRWQQGNVFSCSVLHEALHSHYTQKSLSLSPG

SEQ ID NO: 658 - protein, 869 aa, synthetic construct
  REGION 1..869: note = EN2642-LS (M851L,N857S) Chain 2
  SIGNAL 1..19: note = Mouse Ig heavy chain V region 102 Signal Sequence
  DOMAIN 644..647: note = N-terminal Fc
  VARIANT 851: note = Mutation to increase half-life
  VARIANT 857: note = Mutation to increase half-life
MGWSCIILFLVATATGVHSSEVGNSQAVCPGTLNGLSVTGDAENQYQTLYKLYERCEVVMGNLEIVLTGHNADLSFLQWIREVTGYVLVAMNEFSTLPLPNLRVVRGTQVYDGKFAIFVMLNYNTNSSHALRQLRLTQLTEILSGGVYIEKNDKLCHMDTIDWRDIVRDRDAEIVVKDNGRSCPPCHEVCKGRCWGPGSEDCQTLTKTICAPQCNGHCFGPNPNQCCHDECAGGCSGPQDTDCFACRHFNDSGACVPRCPQPLVANKLTFQLEPNPHTKYQYGGVCVASCPHNFVVDQTSCVRACPPDKMEVDKNGLKMCEPCGGLCPKACEGTGSGSRFQTVDSSNIDGFVNCTKILGNLDFLITGLNGDPWHKIPALDPEKLNVFRTVREITGYLNIQSWPPHMHNFSVFSNLTTIGGRSLYNRGFSLLIMKNLNVTSLGFRSLKEISAGRIYISANRQLCYHHSLNWTKVLRGPTEERLDIKHNRPRRDCVAEGKVCDPLCSSGGCWGPGPGQCLSCRNYSRGGVCVTHCNFLNGEPREFAHEAECFSCHPECQPMEGTATCNGSGSDTCAQCAHFRDGPHCVSSCPHGVLGAKGPIYKYPDVQNECRPCHENCTQGCKGPELQDCLGQTLVLIGKTHLTDKTHTCPPCPAPELLGGPSVFLFPPKPKDTLMISRTPEVTCVVVDVSHEDPEVKFNWYVDGVEVHNAKTKPREEQYNSTYRVVSVLTVLHQDWLNGKEYKCKVSNKALPAPIEKTISKAKGQPREPQVYTLPPSREEMTKNQVSLTCLVKGFYPSDIAVEWESNGQPENNYKTTPPVLDSDGSFFLYSKLTVDKSRWQQGNVFSCSVLHEALHSHYTQKSLSLSPG

SEQ ID NO: 659 - protein, 850 aa, synthetic construct
  REGION 1..850: note = EN2642-LS (M832L,N838S) Chain 2 without signal sequence
  DOMAIN 625..629: note = N-terminal Fc
  VARIANT 832: note = Mutation to increase half-life
  VARIANT 838: note = Mutation to increase half-life
SEVGNSQAVCPGTLNGLSVTGDAENQYQTLYKLYERCEVVMGNLEIVLTGHNADLSFLQWIREVTGYVLVAMNEFSTLPLPNLRVVRGTQVYDGKFAIFVMLNYNTNSSHALRQLRLTQLTEILSGGVYIEKNDKLCHMDTIDWRDIVRDRDAEIVVKDNGRSCPPCHEVCKGRCWGPGSEDCQTLTKTICAPQCNGHCFGPNPNQCCHDECAGGCSGPQDTDCFACRHFNDSGACVPRCPQPLVANKLTFQLEPNPHTKYQYGGVCVASCPHNFVVDQTSCVRACPPDKMEVDKNGLKMCEPCGGLCPKACEGTGSGSRFQTVDSSNIDGFVNCTKILGNLDFLITGLNGDPWHKIPALDPEKLNVFRTVREITGYLNIQSWPPHMHNFSVFSNLTTIGGRSLYNRGFSLLIMKNLNVTSLGFRSLKEISAGRIYISANRQLCYHHSLNWTKVLRGPTEERLDIKHNRPRRDCVAEGKVCDPLCSSGGCWGPGPGQCLSCRNYSRGGVCVTHCNFLNGEPREFAHEAECFSCHPECQPMEGTATCNGSGSDTCAQCAHFRDGPHCVSSCPHGVLGAKGPIYKYPDVQNECRPCHENCTQGCKGPELQDCLGQTLVLIGKTHLTDKTHTCPPCPAPELLGGPSVFLFPPKPKDTLMISRTPEVTCVVVDVSHEDPEVKFNWYVDGVEVHNAKTKPREEQYNSTYRVVSVLTVLHQDWLNGKEYKCKVSNKALPAPIEKTISKAKGQPREPQVYTLPPSREEMTKNQVSLTCLVKGFYPSDIAVEWESNGQPENNYKTTPPVLDSDGSFFLYSKLTVDKSRWQQGNVFSCSVLHEALHSHYTQKSLSLSPG

SEQ ID NO: 660 - protein, 867 aa, synthetic construct
  REGION 1..867: note = EN2642-YTE (M672Y, S674T, T676E) Chain 1
  SIGNAL 1..19: note = Mouse Ig heavy chain V region 102 Signal Sequence
  DOMAIN 641..644: note = N-terminal Fc
  VARIANT 672: note = Mutation to increase half-life
  VARIANT 674: note = Mutation to increase half-life
  VARIANT 676: note = Mutation to increase half-life
MGWSCIILFLVATATGVHSLEEKKVCQGTSNKLSQLGTFEDHFLSLQRMFNNCEVVLGNLEITYVQRNYDLSFLKTIQEVAGYVLIALNTVERIPLENLQIIRGNMYYENSYALAVLSNYDANKTGLKELPMRNLQEILHGAVRFSNNPALCNVESIQWRDIVSSDFLSNMSMDFQNHLGSCQKCDPSCPNGSCWGAGEENCQKLTKIICAQQCSGRCRGKSPSDCCHNQCAAGCTGPRESDCLVCRKFRDEATCKDTCPPLMLYNPTTYQMDVNPEGKYSFGATCVKKCPRNYVVTDHGSCVRACGADSYEMEEDGVRKCKKCEGPCRKVCNGIGIGEFKDSLSINATNIKHFKNCTSISGDLHILPVAFRGDSFTHTPPLDPQELDILKTVKEITGFLLIQAWPENRTDLHAFENLEIIRGRTKQHGQFSLAVVSLNITSLGLRSLKEISDGDVIISGNKNLCYANTINWKKLFGTSGQKTKIISNRGENSCKATGQVCHALCSPEGCWGPEPRDCVSCRNVSRGRECVDKCKLLEGEPREFVENSECIQCHPECLPQAMNITCTGRGPDNCIQCAHYIDSPHCVKTCPAGVMGENNTLVWKYADAGHVCHLCHPNCTYGCTGPGLEGCPTNGPKIPSDKTHTCPPCPAPELLGGPSVFLFPPKPKDTLYITREPEVTCVVVDVSHEDPEVKFNWYVDGVEVHNAKTKPREEQYNSTYRVVSVLTVLHQDWLNGKEYKCKVSNKALPAPIEKTISKAKGQPREPQVYTLPPSRDELTKNQVSLTCLVKGFYPSDIAVEWESNGQPENNYKTTPPVLDSDGSFFLYSKLTVDKSRWQQGNVFSCSVMHEALHNHYTQKSLSLSPGK

SEQ ID NO: 661 - protein, 848 aa, synthetic construct
  REGION 1..848: note = EN2642-YTE (M653Y, S655T, T657E) Chain 1 without the signal sequence
  DOMAIN 622..625: note = N-terminal Fc
  VARIANT 653: note = Mutation to increase half-life
  VARIANT 655: note = Mutation to increase half-life
  VARIANT 657: note = Mutation to increase half-life
LEEKKVCQGTSNKLSQLGTFEDHFLSLQRMFNNCEVVLGNLEITYVQRNYDLSFLKTIQEVAGYVLIALNTVERIPLENLQIIRGNMYYENSYALAVLSNYDANKTGLKELPMRNLQEILHGAVRFSNNPALCNVESIQWRDIVSSDFLSNMSMDFQNHLGSCQKCDPSCPNGSCWGAGEENCQKLTKIICAQQCSGRCRGKSPSDCCHNQCAAGCTGPRESDCLVCRKFRDEATCKDTCPPLMLYNPTTYQMDVNPEGKYSFGATCVKKCPRNYVVTDHGSCVRACGADSYEMEEDGVRKCKKCEGPCRKVCNGIGIGEFKDSLSINATNIKHFKNCTSISGDLHILPVAFRGDSFTHTPPLDPQELDILKTVKEITGFLLIQAWPENRTDLHAFENLEIIRGRTKQHGQFSLAVVSLNITSLGLRSLKEISDGDVIISGNKNLCYANTINWKKLFGTSGQKTKIISNRGENSCKATGQVCHALCSPEGCWGPEPRDCVSCRNVSRGRECVDKCKLLEGEPREFVENSECIQCHPECLPQAMNITCTGRGPDNCIQCAHYIDSPHCVKTCPAGVMGENNTLVWKYADAGHVCHLCHPNCTYGCTGPGLEGCPTNGPKIPSDKTHTCPPCPAPELLGGPSVFLFPPKPKDTLYITREPEVTCVVVDVSHEDPEVKFNWYVDGVEVHNAKTKPREEQYNSTYRVVSVLTVLHQDWLNGKEYKCKVSNKALPAPIEKTISKAKGQPREPQVYTLPPSRDELTKNQVSLTCLVKGFYPSDIAVEWESNGQPENNYKTTPPVLDSDGSFFLYSKLTVDKSRWQQGNVFSCSVMHEALHNHYTQKSLSLSPGK

SEQ ID NO: 662 - protein, 870 aa, synthetic construct
  REGION 1..870: note = EN2642-YTE (M675Y, S677T, T679E) Chain 2
  DOMAIN 644..648: note = N-terminal Fc
  VARIANT 675: note = Mutation to increase half-life
  VARIANT 677: note = Mutation to increase half-life
  VARIANT 679: note = Mutation to increase half-life
  SIGNAL 1..19: note = Mouse Ig heavy chain V region 102 Signal Sequence
MGWSCIILFLVATATGVHSSEVGNSQAVCPGTLNGLSVTGDAENQYQTLYKLYERCEVVMGNLEIVLTGHNADLSFLQWIREVTGYVLVAMNEFSTLPLPNLRVVRGTQVYDGKFAIFVMLNYNTNSSHALRQLRLTQLTEILSGGVYIEKNDKLCHMDTIDWRDIVRDRDAEIVVKDNGRSCPPCHEVCKGRCWGPGSEDCQTLTKTICAPQCNGHCFGPNPNQCCHDECAGGCSGPQDTDCFACRHFNDSGACVPRCPQPLVANKLTFQLEPNPHTKYQYGGVCVASCPHNFVVDQTSCVRACPPDKMEVDKNGLKMCEPCGGLCPKACEGTGSGSRFQTVDSSNIDGFVNCTKILGNLDFLITGLNGDPWHKIPALDPEKLNVFRTVREITGYLNIQSWPPHMHNFSVFSNLTTIGGRSLYNRGFSLLIMKNLNVTSLGFRSLKEISAGRIYISANRQLCYHHSLNWTKVLRGPTEERLDIKHNRPRRDCVAEGKVCDPLCSSGGCWGPGPGQCLSCRNYSRGGVCVTHCNFLNGEPREFAHEAECFSCHPECQPMEGTATCNGSGSDTCAQCAHFRDGPHCVSSCPHGVLGAKGPIYKYPDVQNECRPCHENCTQGCKGPELQDCLGQTLVLIGKTHLTDKTHTCPPCPAPELLGGPSVFLFPPKPKDTLYITREPEVTCVVVDVSHEDPEVKFNWYVDGVEVHNAKTKPREEQYNSTYRVVSVLTVLHQDWLNGKEYKCKVSNKALPAPIEKTISKAKGQPREPQVYTLPPSRDELTKNQVSLTCLVKGFYPSDIAVEWESNGQPENNYKTTPPVLDSDGSFFLYSKLTVDKSRWQQGNVFSCSVMHEALHNHYTQKSLSLSPGK

SEQ ID NO: 663 - protein, 851 aa, synthetic construct
  REGION 1..851: note = EN2642-YTE (M656Y, S658T, T660E) Chain 2 without signal sequence
  DOMAIN 625..629: note = N-terminal Fc
  VARIANT 656: note = Mutation to increase half-life
  VARIANT 658: note = Mutation to increase half-life
  VARIANT 660: note = Mutation to increase half-life
SEVGNSQAVCPGTLNGLSVTGDAENQYQTLYKLYERCEVVMGNLEIVLTGHNADLSFLQWIREVTGYVLVAMNEFSTLPLPNLRVVRGTQVYDGKFAIFVMLNYNTNSSHALRQLRLTQLTEILSGGVYIEKNDKLCHMDTIDWRDIVRDRDAEIVVKDNGRSCPPCHEVCKGRCWGPGSEDCQTLTKTICAPQCNGHCFGPNPNQCCHDECAGGCSGPQDTDCFACRHFNDSGACVPRCPQPLVANKLTFQLEPNPHTKYQYGGVCVASCPHNFVVDQTSCVRACPPDKMEVDKNGLKMCEPCGGLCPKACEGTGSGSRFQTVDSSNIDGFVNCTKILGNLDFLITGLNGDPWHKIPALDPEKLNVFRTVREITGYLNIQSWPPHMHNFSVFSNLTTIGGRSLYNRGFSLLIMKNLNVTSLGFRSLKEISAGRIYISANRQLCYHHSLNWTKVLRGPTEERLDIKHNRPRRDCVAEGKVCDPLCSSGGCWGPGPGQCLSCRNYSRGGVCVTHCNFLNGEPREFAHEAECFSCHPECQPMEGTATCNGSGSDTCAQCAHFRDGPHCVSSCPHGVLGAKGPIYKYPDVQNECRPCHENCTQGCKGPELQDCLGQTLVLIGKTHLTDKTHTCPPCPAPELLGGPSVFLFPPKPKDTLYITREPEVTCVVVDVSHEDPEVKFNWYVDGVEVHNAKTKPREEQYNSTYRVVSVLTVLHQDWLNGKEYKCKVSNKALPAPIEKTISKAKGQPREPQVYTLPPSRDELTKNQVSLTCLVKGFYPSDIAVEWESNGQPENNYKTTPPVLDSDGSFFLYSKLTVDKSRWQQGNVFSCSVMHEALHNHYTQKSLSLSPGK

SEQ ID NO: 664 - protein, 866 aa, synthetic construct
  REGION 1..866: note = EN2642-YTE+LS Chain 1 (M672Y, S674T, T676E, M848L, and N854S)
  SIGNAL 1..19: note = Mouse Ig heavy chain V region 102 Signal Sequence
  DOMAIN 641..644: note = N-terminal Fc
  VARIANT 672: note = Mutation to improve half-life
  VARIANT 674: note = Mutation to improve half-life
  VARIANT 676: note = Mutation to improve half-life
  VARIANT 848: note = Mutation to improve half-life
  VARIANT 854: note = Mutation to improve half-life
MGWSCIILFLVATATGVHSLEEKKVCQGTSNKLSQLGTFEDHFLSLQRMFNNCEVVLGNLEITYVQRNYDLSFLKTIQEVAGYVLIALNTVERIPLENLQIIRGNMYYENSYALAVLSNYDANKTGLKELPMRNLQEILHGAVRFSNNPALCNVESIQWRDIVSSDFLSNMSMDFQNHLGSCQKCDPSCPNGSCWGAGEENCQKLTKIICAQQCSGRCRGKSPSDCCHNQCAAGCTGPRESDCLVCRKFRDEATCKDTCPPLMLYNPTTYQMDVNPEGKYSFGATCVKKCPRNYVVTDHGSCVRACGADSYEMEEDGVRKCKKCEGPCRKVCNGIGIGEFKDSLSINATNIKHFKNCTSISGDLHILPVAFRGDSFTHTPPLDPQELDILKTVKEITGFLLIQAWPENRTDLHAFENLEIIRGRTKQHGQFSLAVVSLNITSLGLRSLKEISDGDVIISGNKNLCYANTINWKKLFGTSGQKTKIISNRGENSCKATGQVCHALCSPEGCWGPEPRDCVSCRNVSRGRECVDKCKLLEGEPREFVENSECIQCHPECLPQAMNITCTGRGPDNCIQCAHYIDSPHCVKTCPAGVMGENNTLVWKYADAGHVCHLCHPNCTYGCTGPGLEGCPTNGPKIPSDKTHTCPPCPAPELLGGPSVFLFPPKPKDTLYITREPEVTCVVVDVSHEDPEVKFNWYVDGVEVHNAKTKPREEQYNSTYRVVSVLTVLHQDWLNGKEYKCKVSNKALPAPIEKTISKAKGQPREPQVYTLPPSREEMTKNQVSLTCLVKGFYPSDIAVEWESNGQPENNYKTTPPVLDSDGSFFLYSKLTVDKSRWQQGNVFSCSVLHEALHSHYTQKSLSLSPG

SEQ ID NO: 665 - protein, 847 aa, synthetic construct
  REGION 1..847: note = EN2642-YTE+LS Chain 1 without Signal Sequence (M653Y, S655T, T657E, M829L, and N835S)
  VARIANT 835: note = Mutation to increase half-life
  VARIANT 653: note = Mutation to increase half-life
  VARIANT 655: note = Mutation to increase half-life
  VARIANT 657: note = Mutation to increase half-life
  VARIANT 829: note = Mutation to increase half-life
  DOMAIN 622..625: note = N-terminal Fc
LEEKKVCQGTSNKLSQLGTFEDHFLSLQRMFNNCEVVLGNLEITYVQRNYDLSFLKTIQEVAGYVLIALNTVERIPLENLQIIRGNMYYENSYALAVLSNYDANKTGLKELPMRNLQEILHGAVRFSNNPALCNVESIQWRDIVSSDFLSNMSMDFQNHLGSCQKCDPSCPNGSCWGAGEENCQKLTKIICAQQCSGRCRGKSPSDCCHNQCAAGCTGPRESDCLVCRKFRDEATCKDTCPPLMLYNPTTYQMDVNPEGKYSFGATCVKKCPRNYVVTDHGSCVRACGADSYEMEEDGVRKCKKCEGPCRKVCNGIGIGEFKDSLSINATNIKHFKNCTSISGDLHILPVAFRGDSFTHTPPLDPQELDILKTVKEITGFLLIQAWPENRTDLHAFENLEIIRGRTKQHGQFSLAVVSLNITSLGLRSLKEISDGDVIISGNKNLCYANTINWKKLFGTSGQKTKIISNRGENSCKATGQVCHALCSPEGCWGPEPRDCVSCRNVSRGRECVDKCKLLEGEPREFVENSECIQCHPECLPQAMNITCTGRGPDNCIQCAHYIDSPHCVKTCPAGVMGENNTLVWKYADAGHVCHLCHPNCTYGCTGPGLEGCPTNGPKIPSDKTHTCPPCPAPELLGGPSVFLFPPKPKDTLYITREPEVTCVVVDVSHEDPEVKFNWYVDGVEVHNAKTKPREEQYNSTYRVVSVLTVLHQDWLNGKEYKCKVSNKALPAPIEKTISKAKGQPREPQVYTLPPSREEMTKNQVSLTCLVKGFYPSDIAVEWESNGQPENNYKTTPPVLDSDGSFFLYSKLTVDKSRWQQGNVFSCSVLHEALHSHYTQKSLSLSPG

SEQ ID NO: 666 - protein, 869 aa, synthetic construct
  REGION 1..869: note = EN2642-YTE+LS Chain 2 (M675Y, S677T, T679E, M851L, and N857S)
  VARIANT 675: note = Mutation to increase half-life
  VARIANT 677: note = Mutation to increase half-life
  VARIANT 679: note = Mutation to increase half-life
  VARIANT 851: note = Mutation to increase half-life
  VARIANT 857: note = Mutation to increase half-life
  DOMAIN 644..648: note = N-terminal Fc
  SIGNAL 1..19: note = Mouse Ig heavy chain V region 102 Signal Sequence
MGWSCIILFLVATATGVHSSEVGNSQAVCPGTLNGLSVTGDAENQYQTLYKLYERCEVVMGNLEIVLTGHNADLSFLQWIREVTGYVLVAMNEFSTLPLPNLRVVRGTQVYDGKFAIFVMLNYNTNSSHALRQLRLTQLTEILSGGVYIEKNDKLCHMDTIDWRDIVRDRDAEIVVKDNGRSCPPCHEVCKGRCWGPGSEDCQTLTKTICAPQCNGHCFGPNPNQCCHDECAGGCSGPQDTDCFACRHFNDSGACVPRCPQPLVANKLTFQLEPNPHTKYQYGGVCVASCPHNFVVDQTSCVRACPPDKMEVDKNGLKMCEPCGGLCPKACEGTGSGSRFQTVDSSNIDGFVNCTKILGNLDFLITGLNGDPWHKIPALDPEKLNVFRTVREITGYLNIQSWPPHMHNFSVFSNLTTIGGRSLYNRGFSLLIMKNLNVTSLGFRSLKEISAGRIYISANRQLCYHHSLNWTKVLRGPTEERLDIKHNRPRRDCVAEGKVCDPLCSSGGCWGPGPGQCLSCRNYSRGGVCVTHCNFLNGEPREFAHEAECFSCHPECQPMEGTATCNGSGSDTCAQCAHFRDGPHCVSSCPHGVLGAKGPIYKYPDVQNECRPCHENCTQGCKGPELQDCLGQTLVLIGKTHLTDKTHTCPPCPAPELLGGPSVFLFPPKPKDTLYITREPEVTCVVVDVSHEDPEVKFNWYVDGVEVHNAKTKPREEQYNSTYRVVSVLTVLHQDWLNGKEYKCKVSNKALPAPIEKTISKAKGQPREPQVYTLPPSREEMTKNQVSLTCLVKGFYPSDIAVEWESNGQPENNYKTTPPVLDSDGSFFLYSKLTVDKSRWQQGNVFSCSVLHEALHSHYTQKSLSLSPG

SEQ ID NO: 667 - protein, 850 aa, synthetic construct
  REGION 1..850: note = EN2642-YTE+LS Chain 2 without signal sequence (M656Y, S658T, T660E, M832L, and N838S)
  VARIANT 656: note = Mutation to increase half-life
  VARIANT 658: note = Mutation to increase half-life
  VARIANT 660: note = Mutation to increase half-life
  VARIANT 832: note = Mutation to increase half-life
  VARIANT 838: note = Mutation to increase half-life
  DOMAIN 625..629: note = N-terminal Fc
SEVGNSQAVCPGTLNGLSVTGDAENQYQTLYKLYERCEVVMGNLEIVLTGHNADLSFLQWIREVTGYVLVAMNEFSTLPLPNLRVVRGTQVYDGKFAIFVMLNYNTNSSHALRQLRLTQLTEILSGGVYIEKNDKLCHMDTIDWRDIVRDRDAEIVVKDNGRSCPPCHEVCKGRCWGPGSEDCQTLTKTICAPQCNGHCFGPNPNQCCHDECAGGCSGPQDTDCFACRHFNDSGACVPRCPQPLVANKLTFQLEPNPHTKYQYGGVCVASCPHNFVVDQTSCVRACPPDKMEVDKNGLKMCEPCGGLCPKACEGTGSGSRFQTVDSSNIDGFVNCTKILGNLDFLITGLNGDPWHKIPALDPEKLNVFRTVREITGYLNIQSWPPHMHNFSVFSNLTTIGGRSLYNRGFSLLIMKNLNVTSLGFRSLKEISAGRIYISANRQLCYHHSLNWTKVLRGPTEERLDIKHNRPRRDCVAEGKVCDPLCSSGGCWGPGPGQCLSCRNYSRGGVCVTHCNFLNGEPREFAHEAECFSCHPECQPMEGTATCNGSGSDTCAQCAHFRDGPHCVSSCPHGVLGAKGPIYKYPDVQNECRPCHENCTQGCKGPELQDCLGQTLVLIGKTHLTDKTHTCPPCPAPELLGGPSVFLFPPKPKDTLYITREPEVTCVVVDVSHEDPEVKFNWYVDGVEVHNAKTKPREEQYNSTYRVVSVLTVLHQDWLNGKEYKCKVSNKALPAPIEKTISKAKGQPREPQVYTLPPSREEMTKNQVSLTCLVKGFYPSDIAVEWESNGQPENNYKTTPPVLDSDGSFFLYSKLTVDKSRWQQGNVFSCSVLHEALHSHYTQKSLSLSPG

SEQ ID NO: 668 - protein, 872 aa, synthetic construct
  REGION 1..872: note = EN2642 Full length hinge Chain 1
  DOMAIN 646..649: note = N-terminal Fc
  SIGNAL 1..19: note = Mouse Ig heavy chain V region 102 Signal Sequence
  REGION 641..655: note = Trastuzumab hinge sequence
MGWSCIILFLVATATGVHSLEEKKVCQGTSNKLSQLGTFEDHFLSLQRMFNNCEVVLGNLEITYVQRNYDLSFLKTIQEVAGYVLIALNTVERIPLENLQIIRGNMYYENSYALAVLSNYDANKTGLKELPMRNLQEILHGAVRFSNNPALCNVESIQWRDIVSSDFLSNMSMDFQNHLGSCQKCDPSCPNGSCWGAGEENCQKLTKIICAQQCSGRCRGKSPSDCCHNQCAAGCTGPRESDCLVCRKFRDEATCKDTCPPLMLYNPTTYQMDVNPEGKYSFGATCVKKCPRNYVVTDHGSCVRACGADSYEMEEDGVRKCKKCEGPCRKVCNGIGIGEFKDSLSINATNIKHFKNCTSISGDLHILPVAFRGDSFTHTPPLDPQELDILKTVKEITGFLLIQAWPENRTDLHAFENLEIIRGRTKQHGQFSLAVVSLNITSLGLRSLKEISDGDVIISGNKNLCYANTINWKKLFGTSGQKTKIISNRGENSCKATGQVCHALCSPEGCWGPEPRDCVSCRNVSRGRECVDKCKLLEGEPREFVENSECIQCHPECLPQAMNITCTGRGPDNCIQCAHYIDSPHCVKTCPAGVMGENNTLVWKYADAGHVCHLCHPNCTYGCTGPGLEGCPTNGPKIPSEPKSCDKTHTCPPCPAPELLGGPSVFLFPPKPKDTLMISRTPEVTCVVVDVSHEDPEVKFNWYVDGVEVHNAKTKPREEQYNSTYRVVSVLTVLHQDWLNGKEYKCKVSNKALPAPIEKTISKAKGQPREPQVYTLPPSRDELTKNQVSLTCLVKGFYPSDIAVEWESNGQPENNYKTTPPVLDSDGSFFLYSKLTVDKSRWQQGNVFSCSVMHEALHNHYTQKSLSLSPGK

SEQ ID NO: 669 - protein, 853 aa, synthetic construct
  REGION 1..853: note = EN2642 Full length hinge Chain 1 without signal sequence
  DOMAIN 627..630: note = N-terminal Fc
  REGION 622..636: note = Trastuzumab hinge sequence
LEEKKVCQGTSNKLSQLGTFEDHFLSLQRMFNNCEVVLGNLEITYVQRNYDLSFLKTIQEVAGYVLIALNTVERIPLENLQIIRGNMYYENSYALAVLSNYDANKTGLKELPMRNLQEILHGAVRFSNNPALCNVESIQWRDIVSSDFLSNMSMDFQNHLGSCQKCDPSCPNGSCWGAGEENCQKLTKIICAQQCSGRCRGKSPSDCCHNQCAAGCTGPRESDCLVCRKFRDEATCKDTCPPLMLYNPTTYQMDVNPEGKYSFGATCVKKCPRNYVVTDHGSCVRACGADSYEMEEDGVRKCKKCEGPCRKVCNGIGIGEFKDSLSINATNIKHFKNCTSISGDLHILPVAFRGDSFTHTPPLDPQELDILKTVKEITGFLLIQAWPENRTDLHAFENLEIIRGRTKQHGQFSLAVVSLNITSLGLRSLKEISDGDVIISGNKNLCYANTINWKKLFGTSGQKTKIISNRGENSCKATGQVCHALCSPEGCWGPEPRDCVSCRNVSRGRECVDKCKLLEGEPREFVENSECIQCHPECLPQAMNITCTGRGPDNCIQCAHYIDSPHCVKTCPAGVMGENNTLVWKYADAGHVCHLCHPNCTYGCTGPGLEGCPTNGPKIPSEPKSCDKTHTCPPCPAPELLGGPSVFLFPPKPKDTLMISRTPEVTCVVVDVSHEDPEVKFNWYVDGVEVHNAKTKPREEQYNSTYRVVSVLTVLHQDWLNGKEYKCKVSNKALPAPIEKTISKAKGQPREPQVYTLPPSRDELTKNQVSLTCLVKGFYPSDIAVEWESNGQPENNYKTTPPVLDSDGSFFLYSKLTVDKSRWQQGNVFSCSVMHEALHNHYTQKSLSLSPGK

SEQ ID NO: 670 - protein, 875 aa, synthetic construct
  REGION 1..875: note = EN2642 Full length hinge Chain 2
  DOMAIN 649..653: note = N-terminal Fc
  SIGNAL 1..19: note = Mouse Ig heavy chain V region 102 Signal Sequence
  REGION 644..658: note = Trastuzumab hinge sequence
MGWSCIILFLVATATGVHSSEVGNSQAVCPGTLNGLSVTGDAENQYQTLYKLYERCEVVMGNLEIVLTGHNADLSFLQWIREVTGYVLVAMNEFSTLPLPNLRVVRGTQVYDGKFAIFVMLNYNTNSSHALRQLRLTQLTEILSGGVYIEKNDKLCHMDTIDWRDIVRDRDAEIVVKDNGRSCPPCHEVCKGRCWGPGSEDCQTLTKTICAPQCNGHCFGPNPNQCCHDECAGGCSGPQDTDCFACRHFNDSGACVPRCPQPLVANKLTFQLEPNPHTKYQYGGVCVASCPHNFVVDQTSCVRACPPDKMEVDKNGLKMCEPCGGLCPKACEGTGSGSRFQTVDSSNIDGFVNCTKILGNLDFLITGLNGDPWHKIPALDPEKLNVFRTVREITGYLNIQSWPPHMHNFSVFSNLTTIGGRSLYNRGFSLLIMKNLNVTSLGFRSLKEISAGRIYISANRQLCYHHSLNWTKVLRGPTEERLDIKHNRPRRDCVAEGKVCDPLCSSGGCWGPGPGQCLSCRNYSRGGVCVTHCNFLNGEPREFAHEAECFSCHPECQPMEGTATCNGSGSDTCAQCAHFRDGPHCVSSCPHGVLGAKGPIYKYPDVQNECRPCHENCTQGCKGPELQDCLGQTLVLIGKTHLTEPKSCDKTHTCPPCPAPELLGGPSVFLFPPKPKDTLMISRTPEVTCVVVDVSHEDPEVKFNWYVDGVEVHNAKTKPREEQYNSTYRVVSVLTVLHQDWLNGKEYKCKVSNKALPAPIEKTISKAKGQPREPQVYTLPPSRDELTKNQVSLTCLVKGFYPSDIAVEWESNGQPENNYKTTPPVLDSDGSFFLYSKLTVDKSRWQQGNVFSCSVMHEALHNHYTQKSLSLSPGK

SEQ ID NO: 671 - protein, 856 aa, synthetic construct
  REGION 1..856: note = EN2642 Full length hinge Chain 2 without signal sequence
  DOMAIN 625..639: note = N-terminal Fc
  REGION 625..639: note = Trastuzumab hinge sequence
SEVGNSQAVCPGTLNGLSVTGDAENQYQTLYKLYERCEVVMGNLEIVLTGHNADLSFLQWIREVTGYVLVAMNEFSTLPLPNLRVVRGTQVYDGKFAIFVMLNYNTNSSHALRQLRLTQLTEILSGGVYIEKNDKLCHMDTIDWRDIVRDRDAEIVVKDNGRSCPPCHEVCKGRCWGPGSEDCQTLTKTICAPQCNGHCFGPNPNQCCHDECAGGCSGPQDTDCFACRHFNDSGACVPRCPQPLVANKLTFQLEPNPHTKYQYGGVCVASCPHNFVVDQTSCVRACPPDKMEVDKNGLKMCEPCGGLCPKACEGTGSGSRFQTVDSSNIDGFVNCTKILGNLDFLITGLNGDPWHKIPALDPEKLNVFRTVREITGYLNIQSWPPHMHNFSVFSNLTTIGGRSLYNRGFSLLIMKNLNVTSLGFRSLKEISAGRIYISANRQLCYHHSLNWTKVLRGPTEERLDIKHNRPRRDCVAEGKVCDPLCSSGGCWGPGPGQCLSCRNYSRGGVCVTHCNFLNGEPREFAHEAECFSCHPECQPMEGTATCNGSGSDTCAQCAHFRDGPHCVSSCPHGVLGAKGPIYKYPDVQNECRPCHENCTQGCKGPELQDCLGQTLVLIGKTHLTEPKSCDKTHTCPPCPAPELLGGPSVFLFPPKPKDTLMISRTPEVTCVVVDVSHEDPEVKFNWYVDGVEVHNAKTKPREEQYNSTYRVVSVLTVLHQDWLNGKEYKCKVSNKALPAPIEKTISKAKGQPREPQVYTLPPSRDELTKNQVSLTCLVKGFYPSDIAVEWESNGQPENNYKTTPPVLDSDGSFFLYSKLTVDKSRWQQGNVFSCSVMHEALHNHYTQKSLSLSPGK

SEQ ID NO: 672 - protein, 227 aa, synthetic construct
  REGION 1..227: note = IgG1 Wildtype Fc
  VARIANT 136: note = E136D
  VARIANT 138: note = M138L
DKTHTCPPCPAPELLGGPSVFLFPPKPKDTLMISRTPEVTCVVVDVSHEDPEVKFNWYVDGVEVHNAKTKPREEQYNSTYRVVSVLTVLHQDWLNGKEYKCKVSNKALPAPIEKTISKAKGQPREPQVYTLPPSRDELTKNQVSLTCLVKGFYPSDIAVEWESNGQPENNYKTTPPVLDSDGSFFLYSKLTVDKSRWQQGNVFSCSVMHEALHNHYTQKSLSLSPGK

SEQ ID NO: 673 - protein, 226 aa, synthetic construct
  VARIANT 208: note = M208L, mutation to increase half-life
  VARIANT 214: note = N214S, mutation to increase half-life
  REGION 1..226: note = IgG1 Fc (M208L, N214S)
DKTHTCPPCPAPELLGGPSVFLFPPKPKDTLMISRTPEVTCVVVDVSHEDPEVKFNWYVDGVEVHNAKTKPREEQYNSTYRVVSVLTVLHQDWLNGKEYKCKVSNKALPAPIEKTISKAKGQPREPQVYTLPPSREEMTKNQVSLTCLVKGFYPSDIAVEWESNGQPENNYKTTPPVLDSDGSFFLYSKLTVDKSRWQQGNVFSCSVLHEALHSHYTQKSLSLSPG

SEQ ID NO: 674 - protein, 227 aa, synthetic construct
  VARIANT 32: note = M32Y, mutation to increase half-life
  VARIANT 36: note = T36E, mutation to increase half-life
  VARIANT 136: note = E136D
  VARIANT 138: note = M138L
  REGION 1..227: note = IgG1 Fc (M32Y, S34T, T36E)
  VARIANT 34: note = S34T
DKTHTCPPCPAPELLGGPSVFLFPPKPKDTLYITREPEVTCVVVDVSHEDPEVKFNWYVDGVEVHNAKTKPREEQYNSTYRVVSVLTVLHQDWLNGKEYKCKVSNKALPAPIEKTISKAKGQPREPQVYTLPPSRDELTKNQVSLTCLVKGFYPSDIAVEWESNGQPENNYKTTPPVLDSDGSFFLYSKLTVDKSRWQQGNVFSCSVMHEALHNHYTQKSLSLSPGK

SEQ ID NO: 675 - protein, 226 aa, synthetic construct
  VARIANT 32: note = M32Y, muation to increase half-life
  VARIANT 34: note = S34T, muation to increase half-life
  VARIANT 36: note = T36E, muation to increase half-life
  VARIANT 208: note = M208L, muation to increase half-life
  VARIANT 214: note = N214S, muation to increase half-life
  REGION 1..226: note = IgG1 Fc (M32Y, S34T, T36E, M208L, N214S)
DKTHTCPPCPAPELLGGPSVFLFPPKPKDTLYITREPEVTCVVVDVSHEDPEVKFNWYVDGVEVHNAKTKPREEQYNSTYRVVSVLTVLHQDWLNGKEYKCKVSNKALPAPIEKTISKAKGQPREPQVYTLPPSREEMTKNQVSLTCLVKGFYPSDIAVEWESNGQPENNYKTTPPVLDSDGSFFLYSKLTVDKSRWQQGNVFSCSVLHEALHSHYTQKSLSLSPG

SEQ ID NO: 676 - protein, 10 aa, synthetic construct
  source 1..10: note = resin A binding region of IgG1
ALHNHYTQKS

SEQ ID NO: 677 - protein, 10 aa, synthetic construct
  source 1..10: note = Resin A binding portion of IgG1 mutated so it does not bind, equivalent to region on IgG3
  VARIANT 5: note = H435R
  VARIANT 6: note = Y436F
ALHNRFTQKS

What is claimed:

1. A construct that contains two chimeric polypeptide chains, wherein:
the construct is a homodimer or is a heterodimer comprising two chimeric polypeptides chains;
the chimeric polypeptide chains in the construct comprise:
an extracellular domain (ECD) or ligand binding portion of the ECD or a sufficient portion of the ECD HER1 and/or HER3 for dimerization; and
an Fc linked directly or indirectly via a polypeptide linker to the ECD or portion thereof,
each chimeric polypeptide chain comprises the polypeptide of any of SEQ ID NOs: 657, 659, 661, 663, 665, and 667, or comprises a polypeptide having at least 95%, 96%, 97%, 98%, or 99% or more sequence identity to the polypeptide of any of SEQ ID NOs: 657, 659, 661, 663, 665, and 667; wherein polypeptides having least 95%, 96%, 97%, 98%, or 99% sequence identity to the polypeptides of any of SEQ ID NOs: 657, 659, 661, 663, 665, and 667 comprise a modification or modifications in the Fc that increase the half-life of a construct comprising the chain;
the ECD is modified to have increased affinity for its cognate receptor or ligand or the ECD or portion thereof has increased dimerization activity; and
the Fc comprises modifications that comprise M428L and N434S (LS), and/or M252Y, S254T, and T256E (YTE) that increase the half-life of the construct comprising the Fc.

2. The construct of claim 1, wherein the modifications in the Fc, by EU numbering, comprise a) M428L and N434S, or b) M252Y, S254T, and T256E, or c) M428L, N434S, M252Y, S254T, and T256E.

3. The chimeric polypeptide chain in the construct of claim 1, comprising or further comprising a hinge comprising the sequence EPKSCDKTHT (residues 219-228 of SEQ ID NO:450).

4. The construct of claim 1, wherein one or both ECDs are modified to have increased affinity for a ligand that binds to the ECD.

5. The construct of claim 1, comprising two chains, wherein:
the construct comprises a heterodimer of two different chains or a homodimer that comprises the two identical chains;
one or both chains comprise the sequence of amino acids set forth in SEQ ID NO: 657, a ligand binding portion thereof, or a sequence having at least 95%, 96%, 97%, 98%, or 99% sequence identity to the sequence of amino acids set forth in SEQ ID NO:657 or the ligand binding portion thereof, whereby a homodimer or heterodimer comprising the chain binds to a ligand for the ECD; and
the second or both chains comprise the sequence of amino acids set forth in SEQ ID NO:659, or ligand binding portion thereof, or a sequence having at least 95%, 96%, 97%, 98%, or 99% sequence identity to the sequence of amino acids set forth in SEQ ID NO:659, or the ligand binding portion thereof, whereby a homodimer or heterodimer comprising the chain binds to a ligand for the ECD.

6. The construct of claim 1, comprising two chains, wherein:
the construct comprises a heterodimer or homodimers of the chains;
one chain comprises the sequence of amino acids set forth in SEQ ID NO: 661, a ligand binding portion thereof, or a sequence having at least 95%, 96%, 97%, 98%, or 99% sequence identity to the sequence of amino acids set forth in SEQ ID NO:661 or the ligand binding portion thereof, whereby a homodimer or heterodimer comprising the chain binds to a ligand for the ECD; and
the second chain comprises the sequence of amino acids set forth in SEQ ID NO:663, or a ligand binding portion thereof, or a sequence having at least 95%, 96%, 97%, 98%, or 99% sequence identity to the sequence of amino acids set forth in SEQ ID NO:663 or the ligand binding portion thereof, whereby a homodimer or heterodimer comprising the chain binds to a ligand for the ECD.

7. The construct of claim 1, wherein:
one chain comprises the sequence of amino acids set forth in SEQ ID NO: 665, or a ligand binding portion thereof, or a sequence having at least 95%, 96%, 97%, 98%, or 99% sequence identity to the sequence of amino acids set forth in SEQ ID NO:665, or the ligand binding portion thereof, whereby a homodimer or heterodimer comprising the chain binds to a ligand for the ECD; and
the second chain comprises the sequence of amino acids set forth in SEQ ID NO:667, or a ligand binding portion thereof, or a sequence having at least 95%, 96%, 97%, 98%, or 99% sequence identity to the sequence of amino acids set forth in SEQ ID NO:667 or the ligand binding portion thereof, whereby a homodimer or heterodimer comprising the chain binds to a ligand for the ECD.

8. The construct of claim 1, wherein:
one chain comprises the sequence of amino acids set forth in SEQ ID NO: 669, or a ligand binding portion thereof, or a sequence having at least 95%, 96%, 97%, 98%, or 99% sequence identity to the sequence of amino acids set forth in SEQ ID NO:669 or the ligand binding portion thereof, whereby a homodimer or heterodimer comprising the chain binds to a ligand for the ECD; and
the second chain comprises the sequence of amino acids set forth in SEQ ID NO:671, or a sequence having at least 95%, 96%, 97%, 98%, or 99%, sequence identity to the sequence of amino acids set forth in SEQ ID NO:671 whereby a homodimer or heterodimer comprising the chain binds to a ligand for the ECD.

9. The construct of claim 1 that is a heterodimer, wherein the Fc in one chain of the heterodimer further comprises replacements to facilitate purification of heterodimers comprising the chain.

10. The construct of claim 9, wherein the replacements comprise, by European numbering, H435R and Y436F in the Fc of the Her1/Fc chain to ablate binding to protein A resin or to IgG3.

11. The construct of claim 1, wherein:
the chimeric polypeptides comprise a HER1 ECD and/or a HER3 ECD;
the HER1 ECD comprises the replacement T15S and G564S with reference to numbering in SEQ ID NO:415; and
the HER3 ECD comprises the replacement G564S.

12. The construct of claim 1, wherein the Fc domain comprises the sequence of amino acids set forth in any of SEQ ID NOs:672-675 or a sequence having at least 95%, 96%, 97%, 98%, 99%, or more sequence identity to the sequence of amino acids set forth in any of SEQ ID NOs:672-675 and retains the multimerization activity, and optionally includes replacements that result in increased serum half-life of the homodimers and/or heterodimers that comprise the chain or chains that comprise the Fc.

13. A composition, comprising a heterodimer or a mixture of heterodimers and homodimers, wherein the heterodimers and homodimers in the mixtures comprise constructs of claim 1.

14. A pharmaceutical composition, comprising a composition of claim 20 in a pharmaceutically acceptable vehicle.

15. A pharmaceutical composition, comprising a mixture of homodimers and heterodimers of claim 1, wherein:
a) one chain comprises the sequence of amino acids set forth in SEQ ID NO: 653, or a sequence having at least 95%, 96%, 97%, 98%, or 99% sequence identity to the sequence of amino acids set forth in SEQ ID NO:653, whereby a homodimer or heterodimer comprising the chain bind to a ligand for the ECD; and
the second chain comprises the sequence of amino acids set forth in SEQ ID NO:655, or a sequence having at least 95%, 96%, 97%, 98%, or 99% sequence identity to the sequence of amino acids set forth in SEQ ID NO:655, whereby a homodimer or heterodimer comprising the chain bind to a ligand for the ECD; or
b) one chain comprises the sequence of amino acids set forth in SEQ ID NO:657 or a sequence having at least 95%, 96%, 97%, 98%, or 99% sequence identity to the sequence of amino acids set forth in SEQ ID NO:657, whereby a homodimer or heterodimer comprising the chain bind to a ligand for the ECD; and
the second chain comprises the sequence of amino acids set forth in SEQ ID NO:659, or a sequence having at least 95%, 96%, 97%, 98%, or 99% sequence identity to the sequence of amino acids set forth in SEQ ID NO:659, whereby a homodimer or heterodimer comprising the chain bind to a ligand for the ECD; or
c) one chain comprises the sequence of amino acids set forth in SEQ ID NO:661 or a sequence having at least 95%, 96%, 97%, 98%, or 99% sequence identity to the sequence of amino acids set forth in SEQ ID NO:661, whereby a homodimer or heterodimer comprising the chain bind to a ligand for the ECD; and
the second chain comprises the sequence of amino acids set forth in SEQ ID NO:663, or a sequence having at least 95%, 96%, 97%, 98%, or 99% sequence identity to the sequence of amino acids set forth in SEQ ID NO:663, whereby a homodimer or heterodimer comprising the chain bind to a ligand for the ECD; or
d) one chain comprises the sequence of amino acids set forth in SEQ ID NO:665 or a sequence having at least 95%, 96%, 97%, 98%, or 99% sequence identity to the sequence of amino acids set forth in SEQ ID NO:665, whereby a homodimer or heterodimer comprising the chain bind to a ligand for the ECD; and
the second chain comprises the sequence of amino acids set forth in SEQ ID NO:667, or a sequence having at least 95%, 96%, 97%, 98%, or 99% sequence identity to the sequence of amino acids set forth in SEQ ID NO:667, whereby a homodimer or heterodimer comprising the chain bind to a ligand for the ECD; or
e) one chain comprises the sequence of amino acids set forth in SEQ ID NO:669 or a sequence having at least 95%, 96%, 97%, 98%, or 99% sequence identity to the sequence of amino acids set forth in SEQ ID NO:669, whereby a homodimer or heterodimer comprising the chain bind to a ligand for the ECD; and
the second chain comprises the sequence of amino acids set forth in SEQ ID NO:671, or a sequence having at least 95%, 96%, 97%, 98%, or 99% sequence identity to the sequence of amino acids set forth in SEQ ID NO:671, whereby a homodimer or heterodimer comprising the chain bind to a ligand for the ECD.

16. The pharmaceutical composition of claim 15, wherein the modified Fc further comprises one or both of the following modifications:
a) a modification(s) to increase or enhance neonatal Fc receptor (FcRn) recycling; and
b) a modification(s) to reduce or eliminate immune effector functions.

17. The pharmaceutical composition of claim 16, wherein the Fc comprises one or more modifications to increase or enhance FcRn recycling that is/are selected from among one or more of T250Q, T250R, M252F, M252W, M252Y, S254T, T256D, T256E, T256Q, V259I, V308F, E380A, M428L, H433K, N434F, N434A, N434W, N434S, N434Y, Y436H, M252Y/T256Q, M252F/T256D, M252Y/S254T/T256E, H433K/N434F/Y436H, N434F/Y436H, T250Q/M428L, T250R/M428L, M428L/N434S, V259I/V308F, V259I/V308F/M428L, E294del/T307P/N434Y, and T256N/A378V/S383N/N434Y, by EU numbering.

18. The pharmaceutical composition of claim 16, wherein the Fc comprises modifications to immune effector functions that are selected from among one or more of complement-dependent cytotoxicity (CDC), antibody-dependent cell-mediated cytotoxicity (ADCC) and antibody-dependent cell-mediated phagocytosis (ADCP).

19. The pharmaceutical composition of claim 16, wherein the Fc comprises modification(s) to reduce or eliminate immune effector functions that are selected from among one or more of:
in IgG1: L235E, L234A/L235A, L234E/L235F/P331S, L234F/L235E/P331S, L234A/L235A/P329G, L234A/L235A/G237A/P238S/H268A/A330S/P331S, G236R/L328R, G237A, E318A, D265A, E233P, N297A, N297Q, N297D, N297G, N297G/D265A, A330L, D270A, P329A, P331A, K322A, V264A, and F241A, by EU numbering; and
in IgG4: L235E, F234A/L235A, S228P/L235E, and S228P/F234A/L235A, by EU numbering.

20. The pharmaceutical composition of claim 16, wherein the Fe is an IgG Fe that comprises one or more of the following modifications:
a) a modification(s) to increase or enhance neonatal Fc receptor (FcRn) recycling, wherein the modification is selected from among one or more of:
T250Q, T250R, M252F, M252W, M252Y, S254T, T256D, T256E, T256Q, V259I, V308F, E380A, M428L, H433K, N434F, N434A, N434W, N434S, N434Y, Y436H, M252Y/T256Q, M252F/T256D, M252Y/S254T/T256E, H433K/N434F/Y436H, N434F/Y436H, T250Q/M428L, T250R/M428L, M428L/N434S, V259I/V308F, V259I/V308F/M428L, E294del/T307P/N434Y, and T256N/A378V/S383N/N434Y, by EU numbering; and/or
b) a modification(s) to increase or enhance immune effector functions, wherein:
the immune effector functions are selected from among one or more of CDC, ADCC, and ADCP; and
the modification(s) to increase or enhance immune effector functions is selected from among one or more of:
in IgG1: S239D, 1332E, S239D/I332E, S239D/A330L/I332E, S298A/E333A/K334A; F243L/R292P/Y300L/V305I/P396L; L235V/F243L/R292P/Y300L/P396L; F243L/R292P/Y300L; L234Y/G236W/S298A in the first heavy chain and S239D/A330L/I332E in the second heavy chain; L234Y/L235Q/G236W/S239M/H268D/D270E/S298A in the first heavy chain and D270E/K326D/A330M/K334E in the second heavy chain; A327Q/P329A; D265A/S267A/H268A/D270A/K326A/S337A; T256A/K290A/S298A/E333A/K334A; G236A; G236A/I332E; G236A/S239D/I332E; G236A/S239D/A330L/I332E; introduction of a biantennary glycan at residue N297; introduction of an afucosylated glycan at residue N297; K326W; K326A; E333A; K326A/E333A; K326W/E333 S; K326M/E333 S; K222W/T223W; K222W/T223W/H224W; D221W/K222W; C220D/D221C; C220D/D221C/K222W/T223W; H268F/S324T; S267E; H268F; S324T; S267E/H268F/S324T; G236A/I332E/S267E/H268F/S324T; E345R; and E345R/E430G/S440Y; by EU numbering; and/or
c) the Fc comprises modifications that increase binding to FcγRIIb that are selected from among one or more of S267E, N297A, L328F, L351S, T366R, L368H, P395K, S267E/L328F and L351S/T366R/L368H/P395K, by EU numbering.

21. The construct of claim 1, wherein, one or both of the chimeric polypeptide chains comprises a linker whereby one or both of the ECDs is linked to the Fc portion via a linker selected from among:
a linker that provides flexibility, increases solubility, and/or relieves or reduces steric hindrance or Van der Waals interactions; and/or
a linker that comprises a hinge region, or is a linker comprising G and/or S residues; and/or
a linker that has the sequence set forth in any of SEQ ID NOs: 427-449 or is a PEG moiety linker; and/or
a linker that comprises a hinge region, or is a linker comprising G and S residues, or is an IgG1, or is an IgG4 Fc; and/or
a GS linker selected from (GlySer)ₙ, where n=1-10; (GlySer₂); (Gly4Ser)ₙ, where n=1-10; (Gly₃Ser)ₙ, where n=1-5; (SerGly₄)ₙ, where n=1-5; (GlySerSerGly)ₙ, where n=1-5; GSGGSSGG; GSSSGSGSGSSG; GSSSGSGSGSSGG; GGSSGG; GGGGSGGGG; GGSSGGSGGSSSG; GSSSGSGSGGSSSGSGSG; GGSSGGSSGGGSSGGSSG; and GSSSGS; and/or
a linker that comprises all or a portion of the hinge sequence of trastuzumab, corresponding to residues 219-233 of SEQ ID NO:450, or all or a portion of the hinge sequence of nivolumab, corresponding to residues 212-223 of SEQ ID NO:451; and/or
the linker comprises the sequence SCDKTH, corresponding to residues 222-227 of SEQ ID NO:450 or DKTH residues 224-227 of SEQ ID NO:450; and/or
a linker that comprises a GS linker and all or a portion of the hinge sequence of trastuzumab, corresponding to residues EPKSCDKTHTCPPCP (219-233 of SEQ ID NO:450); and/or
a linker that comprises a GS linker and comprises the sequence SCDKTH, corresponding to residues 217-222 of SEQ ID NO:456 or DKTH corresponding to residues 219-222 of SEQ ID NO:456; and/or
a linker that is selected from one or more of a linker that:
comprises a GS linker and all or a portion of the hinge sequence of nivolumab, corresponding to residues 212-223 of SEQ ID NO:451;
comprises (Gly₄Ser)₃;
comprises (Gly₄Ser)₃ and SCDKTH (residues 217-222 of SEQ ID NO:456) or DKTH;
comprises (Gly₄Ser)₃ and the hinge sequence of trastuzumab, corresponding to residues 219-233 of SEQ ID NO:450; and
comprises (Gly₄Ser)₃ and the hinge sequence of nivolumab, corresponding to residues 212-223 of SEQ ID NO:451.

22. The construct of claim 1, wherein:
an ECD in a chimeric polypeptide chain comprises a HER1 that is further modified to comprise S418F with reference to the sequence of the mature protein, set forth in SEQ ID NO:415, whereby the HER3 ligand NRG2-β stimulates HER1, and the resulting ECD binds to or interacts with at least two ligands, EGF for HER1, and NRG2-β for HER3; and/or
one or both ECDs comprise a modification at position S442 or a corresponding position of an HER receptor; and/or
an ECD comprises a modification, whereby the HER1 ECD interacts with NRG-2β; and/or
an ECD comprises a sufficient portion of the ECD of the modified HER1 to interact with EGF and NRG-2β.

23. A nucleic acid molecule encoding a polypeptide chain or the construct of claim 1.

24. The nucleic acid of claim 23 that comprises vectors encoding each of the chimeric polypeptides.

25. A cell line or isolated cell, comprising the nucleic acid of claim 24.

26. The cell line of claim 23, comprising nucleic acid encoding a mixture of chimeric polypeptide chains.

27. A method for treating a disease, disorder, or condition that is a cancer, an inflammatory disease, an angiogenic disease, or a hyperproliferative disease, comprising administering a therapeutically effective amount of a pharmaceutical composition of claim 16.

28. The method of claim 27, wherein the compositions comprise a mixture of homodimers and heterodimers.

29. The method or claim 27, wherein the disease, disorder, or condition is a cancer that is pancreatic, gastric, head and neck, cervical, lung, colorectal, endometrial, prostate, esophageal, ovarian, uterine, glioma, bladder, renal, or breast cancer.

30. A method for treating cancer, comprising administering a pharmaceutical composition of claim 16, and a second treatment that is a different anticancer agent or treatment.

31. A method of producing a composition comprising a mixture of homodimers and heterodimers, comprising culturing a cell or cell line of claim 26 under conditions, whereby he mixture of homodimers and heterodimers is expressed in the cell or a cell in the cell line.

32. A method for purification of a heterodimer from among heterodimers and homodimers, comprising modifying one chain of the heterodimer to ablate binding to a protein chromatography resin, wherein:
the heterodimers and homodimers comprise a construct of claim 1;
the modified Fc is an IgG1 Fc, and the method comprises introducing amino acid modifications into the Fc to ablate binding to protein A resin; and
the methods comprise the replacements H435R and Y436F in the IgG1 Fc.

33. A method of purification of heterodimers from among a mixture of heterodimers and homodimers by cation exchange chromatograph, wherein the heterodimers and homodimers comprise a construct of claim 1, comprising:
first running HER1/Fc and HER3/Fc homodimers as column chromatograph retention time (RT) markers; and
then separating the heterodimers from the homodimers based on the RT markers.
